United States Patent Application Publication US 2025/0304994 A1 - sequence listing, part 4

SEQ ID NO: 23599 - DNA, 630 bp, synthetic construct
  source 1..630: mol_type = other DNA
ttactcgcgcacgtgttgagtggcacgtgcgttgtccaaacagctacacccacacccttcggggcgggtttgtcccgccctcgggttcctcgcggaacccccccctccctctctctctttctatccgccctcacttcccataactacagtgctttggtaggtgagcaccctgaccccccgcggaagctgctaacgtggcaactgtggggatccaggcaggttatcaaaggcacccggtctttccgccttcaggagtatctctgccggtgaattccggtagggctctgcttggtgccaacctcccccaaatgcgcgctgcgggagtgctcttccccaactcatcttagtaacctctcatgtgtgtgcttggtcagcatatctgaggcgacgttccgctgtcccagaccagtccagcaatggacgggccagtgtgcgtagtcgctttccggttttccggcgcatgtttggcgaaacgctgaggtaaggttggtgtgcccaacgcccgtaatttggtgatacctcaagaccacccaggaatgccagggaggtaccccacttcggtgggatctgaccctgggctaattgtctacggtggttcttcttgcttccacttctcttttttctggcatg

SEQ ID NO: 23600 - DNA, 580 bp, synthetic construct
  source 1..580: mol_type = other DNA
cacacccttcggggcgggtttgtcccgccctcgggttcctcgcggaacccccccctccctctctctctttctatccgccctcacttcccataactacagtgctttggtaggtgagcaccctgaccccccgcggaagctgctaacgtggcaactgtggggatccaggcaggttatcaaaggcacccggtctttccgccttcaggagtatctctgccggtgaattccggtagggctctgcttggtgccaacctcccccaaatgcgcgctgcgggagtgctcttccccaactcatcttagtaacctctcatgtgtgtgcttggtcagcatatctgaggcgacgttccgctgtcccagaccagtccagcaatggacgggccagtgtgcgtagtcgctttccggttttccggcgcatgtttggcgaaacgctgaggtaaggttggtgtgcccaacgcccgtaatttggtgatacctcaagaccacccaggaatgccagggaggtaccccacttcggtgggatctgaccctgggctaattgtctacggtggttcttcttgcttccacttctcttttttctggcatg

SEQ ID NO: 23601 - DNA, 530 bp, synthetic construct
  source 1..530: mol_type = other DNA
ccccctccctctctctctttctatccgccctcacttcccataactacagtgctttggtaggtgagcaccctgaccccccgcggaagctgctaacgtggcaactgtggggatccaggcaggttatcaaaggcacccggtctttccgccttcaggagtatctctgccggtgaattccggtagggctctgcttggtgccaacctcccccaaatgcgcgctgcgggagtgctcttccccaactcatcttagtaacctctcatgtgtgtgcttggtcagcatatctgaggcgacgttccgctgtcccagaccagtccagcaatggacgggccagtgtgcgtagtcgctttccggttttccggcgcatgtttggcgaaacgctgaggtaaggttggtgtgcccaacgcccgtaatttggtgatacctcaagaccacccaggaatgccagggaggtaccccacttcggtgggatctgaccctgggctaattgtctacggtggttcttcttgcttccacttctcttttttctggcatg

SEQ ID NO: 23602 - DNA, 702 bp, synthetic construct
  source 1..702: mol_type = other DNA
cctacccgcgacaagaatgccgtcatctgtccttatcacccatattctttcccttcccccgcaaccatcacgcttactcgcgcacgtgttgagtggcacgtgcgttgtccaaacagttacactcacacccttggggcgggtttgtcccgccctcgggttcctcgcggaaccctccctcttctctctccctttctatccgccttcactttccataactacagtgctttggtaggtaagcatcctgaccccccgcggaagctgccaacgtggcaactgtggggatccaggcaggttatcaaaggcacccggtctttccgccttcaggagtatccctgccggtgaattccgacagggctctgcttggtgccaacctcccccaaatgcgcgctgcgggagtgctcttccccaactcatcttagtaacctctcatgtgtgtgcttggtcagcatatctgaggcgacgttccgctgtcccagaccagtccagcaatggacgggccagtgtgcgtagtcgctttccggtttcccggcgcatgtttggcgaaacgctgaggtaaggttggtgtgcccaatgcccgtaatttggtgacacctcaagaccacccaggaatgccagggaggtaccccacttcggtgggatctgaccctgggctaattgtctacggtggttcttcttgcttccacttctcttttttctggcatg

SEQ ID NO: 23603 - DNA, 652 bp, synthetic construct
  source 1..652: mol_type = other DNA
cccttcccccgcaaccatcacgcttactcgcgcacgtgttgagtggcacgtgcgttgtccaaacagttacactcacacccttggggcgggtttgtcccgccctcgggttcctcgcggaaccctccctcttctctctccctttctatccgccttcactttccataactacagtgctttggtaggtaagcatcctgaccccccgcggaagctgccaacgtggcaactgtggggatccaggcaggttatcaaaggcacccggtctttccgccttcaggagtatccctgccggtgaattccgacagggctctgcttggtgccaacctcccccaaatgcgcgctgcgggagtgctcttccccaactcatcttagtaacctctcatgtgtgtgcttggtcagcatatctgaggcgacgttccgctgtcccagaccagtccagcaatggacgggccagtgtgcgtagtcgctttccggtttcccggcgcatgtttggcgaaacgctgaggtaaggttggtgtgcccaatgcccgtaatttggtgacacctcaagaccacccaggaatgccagggaggtaccccacttcggtgggatctgaccctgggctaattgtctacggtggttcttcttgcttccacttctcttttttctggcatg

SEQ ID NO: 23604 - DNA, 602 bp, synthetic construct
  source 1..602: mol_type = other DNA
tgcgttgtccaaacagttacactcacacccttggggcgggtttgtcccgccctcgggttcctcgcggaaccctccctcttctctctccctttctatccgccttcactttccataactacagtgctttggtaggtaagcatcctgaccccccgcggaagctgccaacgtggcaactgtggggatccaggcaggttatcaaaggcacccggtctttccgccttcaggagtatccctgccggtgaattccgacagggctctgcttggtgccaacctcccccaaatgcgcgctgcgggagtgctcttccccaactcatcttagtaacctctcatgtgtgtgcttggtcagcatatctgaggcgacgttccgctgtcccagaccagtccagcaatggacgggccagtgtgcgtagtcgctttccggtttcccggcgcatgtttggcgaaacgctgaggtaaggttggtgtgcccaatgcccgtaatttggtgacacctcaagaccacccaggaatgccagggaggtaccccacttcggtgggatctgaccctgggctaattgtctacggtggttcttcttgcttccacttctcttttttctggcatg

SEQ ID NO: 23605 - DNA, 552 bp, synthetic construct
  source 1..552: mol_type = other DNA
cctcgggttcctcgcggaaccctccctcttctctctccctttctatccgccttcactttccataactacagtgctttggtaggtaagcatcctgaccccccgcggaagctgccaacgtggcaactgtggggatccaggcaggttatcaaaggcacccggtctttccgccttcaggagtatccctgccggtgaattccgacagggctctgcttggtgccaacctcccccaaatgcgcgctgcgggagtgctcttccccaactcatcttagtaacctctcatgtgtgtgcttggtcagcatatctgaggcgacgttccgctgtcccagaccagtccagcaatggacgggccagtgtgcgtagtcgctttccggtttcccggcgcatgtttggcgaaacgctgaggtaaggttggtgtgcccaatgcccgtaatttggtgacacctcaagaccacccaggaatgccagggaggtaccccacttcggtgggatctgaccctgggctaattgtctacggtggttcttcttgcttccacttctcttttttctggcatg

SEQ ID NO: 23606 - DNA, 502 bp, synthetic construct
  source 1..502: mol_type = other DNA
cttcactttccataactacagtgctttggtaggtaagcatcctgaccccccgcggaagctgccaacgtggcaactgtggggatccaggcaggttatcaaaggcacccggtctttccgccttcaggagtatccctgccggtgaattccgacagggctctgcttggtgccaacctcccccaaatgcgcgctgcgggagtgctcttccccaactcatcttagtaacctctcatgtgtgtgcttggtcagcatatctgaggcgacgttccgctgtcccagaccagtccagcaatggacgggccagtgtgcgtagtcgctttccggtttcccggcgcatgtttggcgaaacgctgaggtaaggttggtgtgcccaatgcccgtaatttggtgacacctcaagaccacccaggaatgccagggaggtaccccacttcggtgggatctgaccctgggctaattgtctacggtggttcttcttgcttccacttctcttttttctggcatg

SEQ ID NO: 23607 - DNA, 603 bp, synthetic construct
  source 1..603: mol_type = other DNA
catgtgcattgagtggtgcacgtgcttgaacaaacagctacactcacatgggggcgggttttcccgccctgcggcctctcgcgaggcccacccctccccttcctcccataactacagtgctttggtaggtaagcatcctgatcccccgcggaagctgctcacgtggcaactgtggggacccagacaggttatcaaaggcacccggtctttccgccttcaggagtatccctgctagtgaattctagtagggctctgcttggtgccaacctcccccaaatgcgcgctgcgggagtgctcttccccaactcaccctagtatcctctcatgtgtgtgcttggtcagcatatctgagacgatgttccgctgtcccagaccagtccagtaatggacgggccagtgtgcgtagtcgtcttccggcttgtccggcgcatgtttggtgaaccggtggggtaaggttggtgtgcccaacgcccgtactttggtgatacctcaagaccacccaggaatgccagggaggtaccccgcttcacagcgggatctgaccctgggctaattgtctacggtggttcttcttgcttccacttctttctactgttcgccacc

SEQ ID NO: 23608 - DNA, 553 bp, synthetic construct
  source 1..553: mol_type = other DNA
ggggcgggttttcccgccctgcggcctctcgcgaggcccacccctccccttcctcccataactacagtgctttggtaggtaagcatcctgatcccccgcggaagctgctcacgtggcaactgtggggacccagacaggttatcaaaggcacccggtctttccgccttcaggagtatccctgctagtgaattctagtagggctctgcttggtgccaacctcccccaaatgcgcgctgcgggagtgctcttccccaactcaccctagtatcctctcatgtgtgtgcttggtcagcatatctgagacgatgttccgctgtcccagaccagtccagtaatggacgggccagtgtgcgtagtcgtcttccggcttgtccggcgcatgtttggtgaaccggtggggtaaggttggtgtgcccaacgcccgtactttggtgatacctcaagaccacccaggaatgccagggaggtaccccgcttcacagcgggatctgaccctgggctaattgtctacggtggttcttcttgcttccacttctttctactgttcgccacc

SEQ ID NO: 23609 - DNA, 503 bp, synthetic construct
  source 1..503: mol_type = other DNA
tcctcccataactacagtgctttggtaggtaagcatcctgatcccccgcggaagctgctcacgtggcaactgtggggacccagacaggttatcaaaggcacccggtctttccgccttcaggagtatccctgctagtgaattctagtagggctctgcttggtgccaacctcccccaaatgcgcgctgcgggagtgctcttccccaactcaccctagtatcctctcatgtgtgtgcttggtcagcatatctgagacgatgttccgctgtcccagaccagtccagtaatggacgggccagtgtgcgtagtcgtcttccggcttgtccggcgcatgtttggtgaaccggtggggtaaggttggtgtgcccaacgcccgtactttggtgatacctcaagaccacccaggaatgccagggaggtaccccgcttcacagcgggatctgaccctgggctaattgtctacggtggttcttcttgcttccacttctttctactgttcgccacc

SEQ ID NO: 23610 - DNA, 611 bp, synthetic construct
  source 1..611: mol_type = other DNA
cttcccttcactccttcgggactgttggggaggaacacaacagggctcccctgttttcccattccttcccccttttcccaaccccaaccgccgtatctggtggcggcaagacacacgggtctttccctctaaagcacaattgtgtgtgtgtcccaggtcctcctgcgtacggtgcgggagtgctcccacccaactgttgtaagcctgtccaacgcgtcgtcctggcaagactatgacgtcgcatgttccgctgcggatgccgaccgggtaaccggttccccagtgtgtgtagtgcgatcttccaggtcctcctggttggcgttgtccagaaactgcttcaggtaagtggggtgtgcccaatccctacaaaggttgattctttcaccaccttaggaatgctccggaggtaccccagcaacagctgggatctgaccggaggctaattgtctacgggtggtgtttcctttttcttttcacacaactctactgctgacaactcactgactatccacttgctctcttgtgcctttctgctctggttcaagttccttgattgtttttgactgcttttcactgcttttcttctcacaatccttgctcagttcaaagtc

SEQ ID NO: 23611 - DNA, 561 bp, synthetic construct
  source 1..561: mol_type = other DNA
ctgttttcccattccttcccccttttcccaaccccaaccgccgtatctggtggcggcaagacacacgggtctttccctctaaagcacaattgtgtgtgtgtcccaggtcctcctgcgtacggtgcgggagtgctcccacccaactgttgtaagcctgtccaacgcgtcgtcctggcaagactatgacgtcgcatgttccgctgcggatgccgaccgggtaaccggttccccagtgtgtgtagtgcgatcttccaggtcctcctggttggcgttgtccagaaactgcttcaggtaagtggggtgtgcccaatccctacaaaggttgattctttcaccaccttaggaatgctccggaggtaccccagcaacagctgggatctgaccggaggctaattgtctacgggtggtgtttcctttttcttttcacacaactctactgctgacaactcactgactatccacttgctctcttgtgcctttctgctctggttcaagttccttgattgtttttgactgcttttcactgcttttcttctcacaatccttgctcagttcaaagtc

SEQ ID NO: 23612 - DNA, 511 bp, synthetic construct
  source 1..511: mol_type = other DNA
tggcggcaagacacacgggtctttccctctaaagcacaattgtgtgtgtgtcccaggtcctcctgcgtacggtgcgggagtgctcccacccaactgttgtaagcctgtccaacgcgtcgtcctggcaagactatgacgtcgcatgttccgctgcggatgccgaccgggtaaccggttccccagtgtgtgtagtgcgatcttccaggtcctcctggttggcgttgtccagaaactgcttcaggtaagtggggtgtgcccaatccctacaaaggttgattctttcaccaccttaggaatgctccggaggtaccccagcaacagctgggatctgaccggaggctaattgtctacgggtggtgtttcctttttcttttcacacaactctactgctgacaactcactgactatccacttgctctcttgtgcctttctgctctggttcaagttccttgattgtttttgactgcttttcactgcttttcttctcacaatccttgctcagttcaaagtc

SEQ ID NO: 23613 - DNA, 575 bp, synthetic construct
  source 1..575: mol_type = other DNA
tttgagcacacccgcccactagggccccccatccaggggggcaacgggcaagcacttctgtttccccggtatgatctgataggctgtaaccacggctgaaacagagattatcgttatccgcttcactacttcgagaagcctagtaatgatgggtgaaattgaatccgttgatccggtgtctcccccacaccagaaactcatgatgagggttgccatcccggctacggcgacgtagcgggcatccctgcgctggcatgaggcctcttaggaggacggatgatatggatcttgtcgtgaagagcctattgagctagtgtcgactcctccgcccccgtgaatgcggctaatcctaaccccggagcaggtgggtccaatccagggcctggcctgtcgtaatgcgtaagtctgggacggaaccgactactttcgggaaggcgtgtttccatttgttcattatttgtgtgtttatggtgacaactctgggtaaacgttctattgcgtttattgagagattcccaacaattgaacaaacgagaactacctgttttattaaatttacacagagaagaattaca

SEQ ID NO: 23614 - DNA, 525 bp, synthetic construct
  source 1..525: mol_type = other DNA
agcacttctgtttccccggtatgatctgataggctgtaaccacggctgaaacagagattatcgttatccgcttcactacttcgagaagcctagtaatgatgggtgaaattgaatccgttgatccggtgtctcccccacaccagaaactcatgatgagggttgccatcccggctacggcgacgtagcgggcatccctgcgctggcatgaggcctcttaggaggacggatgatatggatcttgtcgtgaagagcctattgagctagtgtcgactcctccgcccccgtgaatgcggctaatcctaaccccggagcaggtgggtccaatccagggcctggcctgtcgtaatgcgtaagtctgggacggaaccgactactttcgggaaggcgtgtttccatttgttcattatttgtgtgtttatggtgacaactctgggtaaacgttctattgcgtttattgagagattcccaacaattgaacaaacgagaactacctgttttattaaatttacacagagaagaattaca

SEQ ID NO: 23615 - DNA, 580 bp, synthetic construct
  source 1..580: mol_type = other DNA
aagacattagaagaatagcataccgcccactagggccctgcagccagcagggtaacgggcaagcacttctgtctccccggtagaacggtataggctgtacccacggccgaaaactgaactatcgttacccgactccgtacttcgcaaagcttagtaggaaactggaaagttcgagttattgacccggagtgttccccccactccagaaacgcgtgatgagggttgccaccccgaccatggcgacatggtgggcatccctgcgctggcacgcggcctctaagaggataactcgctcctactggtaaccgaagagccccgtgagctacggtttattcctccgcctccctgaatgcggctaatcctaacccatgagcagttgccatagatccatatggtggactgtcgtaacgcgtaagttgtgggcggaaccgactactttgggatggcgtgtttccttgttttctccatttgttgttgtatggtgacaagttatagatctcgatctatagcgtttcttgagagatttccaaacatttattcaagtcgtacaattcttgtgtttaagcagtacagtgtaacc

SEQ ID NO: 23616 - DNA, 530 bp, synthetic construct
  source 1..530: mol_type = other DNA
ggtaacgggcaagcacttctgtctccccggtagaacggtataggctgtacccacggccgaaaactgaactatcgttacccgactccgtacttcgcaaagcttagtaggaaactggaaagttcgagttattgacccggagtgttccccccactccagaaacgcgtgatgagggttgccaccccgaccatggcgacatggtgggcatccctgcgctggcacgcggcctctaagaggataactcgctcctactggtaaccgaagagccccgtgagctacggtttattcctccgcctccctgaatgcggctaatcctaacccatgagcagttgccatagatccatatggtggactgtcgtaacgcgtaagttgtgggcggaaccgactactttgggatggcgtgtttccttgttttctccatttgttgttgtatggtgacaagttatagatctcgatctatagcgtttcttgagagatttccaaacatttattcaagtcgtacaattcttgtgtttaagcagtacagtgtaacc

SEQ ID NO: 23617 - DNA, 615 bp, synthetic construct
  source 1..615: mol_type = other DNA
cttcccttcactccctcgggactgttggggaggaacacaacagggctcccctgtatttcctcttcccattccccctttcctaaccccaaccgccgtatctggtggcggtaagacacacgggtctttccctctaaagcacaattgtgtgtgtgtcccaggtcctcctgcgttcggtgcgggagtgctcccacccaactgttgtaagcctgtccaacgtgtcgtcctggcaagactatgacgtcgcatgttccgctgtggatgccgaccgggtaaccggttccccagtgtgtgtagtgcgatcttccaggttctcctggttggcgttgtccagaaactgcttcgggtaagtggggtgtgcccaatccctacaagggttgattctttcaccaccttaggaatgctccggaggtaccccagcaacagctgggatctgaccggaggctaattgtctacgggtggtgtttccattttctttttcacacaacttcattgctgacaactcactgactaatcacttgctctcttgtgcctttctgctctggttcaagttccttgattgtttgtttgattgcttttcactgctttcttcccacaatccttgctcagttcaaagtc

SEQ ID NO: 23618 - DNA, 565 bp, synthetic construct
  source 1..565: mol_type = other DNA
ctgtatttcctcttcccattccccctttcctaaccccaaccgccgtatctggtggcggtaagacacacgggtctttccctctaaagcacaattgtgtgtgtgtcccaggtcctcctgcgttcggtgcgggagtgctcccacccaactgttgtaagcctgtccaacgtgtcgtcctggcaagactatgacgtcgcatgttccgctgtggatgccgaccgggtaaccggttccccagtgtgtgtagtgcgatcttccaggttctcctggttggcgttgtccagaaactgcttcgggtaagtggggtgtgcccaatccctacaagggttgattctttcaccaccttaggaatgctccggaggtaccccagcaacagctgggatctgaccggaggctaattgtctacgggtggtgtttccattttctttttcacacaacttcattgctgacaactcactgactaatcacttgctctcttgtgcctttctgctctggttcaagttccttgattgtttgtttgattgcttttcactgctttcttcccacaatccttgctcagttcaaagtc

SEQ ID NO: 23619 - DNA, 515 bp, synthetic construct
  source 1..515: mol_type = other DNA
ggtggcggtaagacacacgggtctttccctctaaagcacaattgtgtgtgtgtcccaggtcctcctgcgttcggtgcgggagtgctcccacccaactgttgtaagcctgtccaacgtgtcgtcctggcaagactatgacgtcgcatgttccgctgtggatgccgaccgggtaaccggttccccagtgtgtgtagtgcgatcttccaggttctcctggttggcgttgtccagaaactgcttcgggtaagtggggtgtgcccaatccctacaagggttgattctttcaccaccttaggaatgctccggaggtaccccagcaacagctgggatctgaccggaggctaattgtctacgggtggtgtttccattttctttttcacacaacttcattgctgacaactcactgactaatcacttgctctcttgtgcctttctgctctggttcaagttccttgattgtttgtttgattgcttttcactgctttcttcccacaatccttgctcagttcaaagtc

SEQ ID NO: 23620 - DNA, 737 bp, synthetic construct
  source 1..737: mol_type = other DNA
agtctggattcccaaggcccactcggttcaacttcggtttccggacaaatacaaagaacctcagtcctcttggtactttctcgcctgagtctacaaagcgagaaacctgcccctctaacgccagacgagcggcataaaactcgaacttctggcacgttccaccaccccttctcctatcccaacccccattgcgctctcaaggtcgcgcttttccgagactagctcggattcaaaaagttcctggcaccctttaccccttcaggcccttaaggtaggaactgaccttgtgctgtgatctcggtgcggaagtgctactgcgtagtgattgtaagatccttttgtggttctgccctggcaaggctacagagtgctgtgatccgctgcggatgccatcctggtaacaggacccccagtgtgcgcaacagtatgttcacggtcttccgtgttcaccacattcggaacactgctttcgtgaaacagtgtgtgtccaatccctgtgatcagtatcaaccacaccacctaggaatgctaggaaggtaccccggttcgccgggatctgatcctaggctaattgtctacggtggtgctcctttttattttccacttcaactcactggttacaactgcttgatttctgtgtttgctgcttttctctgctctcactgccattctcaagtgttcacactgtccaagctcctttggttgttcgcttccacttgccactgtcaactcttgtc

SEQ ID NO: 23621 - DNA, 687 bp, synthetic construct
  source 1..687: mol_type = other DNA
acaaagaacctcagtcctcttggtactttctcgcctgagtctacaaagcgagaaacctgcccctctaacgccagacgagcggcataaaactcgaacttctggcacgttccaccaccccttctcctatcccaacccccattgcgctctcaaggtcgcgcttttccgagactagctcggattcaaaaagttcctggcaccctttaccccttcaggcccttaaggtaggaactgaccttgtgctgtgatctcggtgcggaagtgctactgcgtagtgattgtaagatccttttgtggttctgccctggcaaggctacagagtgctgtgatccgctgcggatgccatcctggtaacaggacccccagtgtgcgcaacagtatgttcacggtcttccgtgttcaccacattcggaacactgctttcgtgaaacagtgtgtgtccaatccctgtgatcagtatcaaccacaccacctaggaatgctaggaaggtaccccggttcgccgggatctgatcctaggctaattgtctacggtggtgctcctttttattttccacttcaactcactggttacaactgcttgatttctgtgtttgctgcttttctctgctctcactgccattctcaagtgttcacactgtccaagctcctttggttgttcgcttccacttgccactgtcaactcttgtc

SEQ ID NO: 23622 - DNA, 637 bp, synthetic construct
  source 1..637: mol_type = other DNA
agaaacctgcccctctaacgccagacgagcggcataaaactcgaacttctggcacgttccaccaccccttctcctatcccaacccccattgcgctctcaaggtcgcgcttttccgagactagctcggattcaaaaagttcctggcaccctttaccccttcaggcccttaaggtaggaactgaccttgtgctgtgatctcggtgcggaagtgctactgcgtagtgattgtaagatccttttgtggttctgccctggcaaggctacagagtgctgtgatccgctgcggatgccatcctggtaacaggacccccagtgtgcgcaacagtatgttcacggtcttccgtgttcaccacattcggaacactgctttcgtgaaacagtgtgtgtccaatccctgtgatcagtatcaaccacaccacctaggaatgctaggaaggtaccccggttcgccgggatctgatcctaggctaattgtctacggtggtgctcctttttattttccacttcaactcactggttacaactgcttgatttctgtgtttgctgcttttctctgctctcactgccattctcaagtgttcacactgtccaagctcctttggttgttcgcttccacttgccactgtcaactcttgtc

SEQ ID NO: 23623 - DNA, 587 bp, synthetic construct
  source 1..587: mol_type = other DNA
ggcacgttccaccaccccttctcctatcccaacccccattgcgctctcaaggtcgcgcttttccgagactagctcggattcaaaaagttcctggcaccctttaccccttcaggcccttaaggtaggaactgaccttgtgctgtgatctcggtgcggaagtgctactgcgtagtgattgtaagatccttttgtggttctgccctggcaaggctacagagtgctgtgatccgctgcggatgccatcctggtaacaggacccccagtgtgcgcaacagtatgttcacggtcttccgtgttcaccacattcggaacactgctttcgtgaaacagtgtgtgtccaatccctgtgatcagtatcaaccacaccacctaggaatgctaggaaggtaccccggttcgccgggatctgatcctaggctaattgtctacggtggtgctcctttttattttccacttcaactcactggttacaactgcttgatttctgtgtttgctgcttttctctgctctcactgccattctcaagtgttcacactgtccaagctcctttggttgttcgcttccacttgccactgtcaactcttgtc

SEQ ID NO: 23624 - DNA, 537 bp, synthetic construct
  source 1..537: mol_type = other DNA
ggtcgcgcttttccgagactagctcggattcaaaaagttcctggcaccctttaccccttcaggcccttaaggtaggaactgaccttgtgctgtgatctcggtgcggaagtgctactgcgtagtgattgtaagatccttttgtggttctgccctggcaaggctacagagtgctgtgatccgctgcggatgccatcctggtaacaggacccccagtgtgcgcaacagtatgttcacggtcttccgtgttcaccacattcggaacactgctttcgtgaaacagtgtgtgtccaatccctgtgatcagtatcaaccacaccacctaggaatgctaggaaggtaccccggttcgccgggatctgatcctaggctaattgtctacggtggtgctcctttttattttccacttcaactcactggttacaactgcttgatttctgtgtttgctgcttttctctgctctcactgccattctcaagtgttcacactgtccaagctcctttggttgttcgcttccacttgccactgtcaactcttgtc

SEQ ID NO: 23625 - DNA, 720 bp, synthetic construct; identical to SEQ ID NO: 23242
  source 1..720: mol_type = other DNA

SEQ ID NO: 23626 - DNA, 670 bp, synthetic construct; identical to SEQ ID NO: 23243
  source 1..670: mol_type = other DNA

SEQ ID NO: 23627 - DNA, 620 bp, synthetic construct; identical to SEQ ID NO: 23244
  source 1..620: mol_type = other DNA

SEQ ID NO: 23628 - DNA, 570 bp, synthetic construct; identical to SEQ ID NO: 23245
  source 1..570: mol_type = other DNA

SEQ ID NO: 23629 - DNA, 520 bp, synthetic construct; identical to SEQ ID NO: 23246
  source 1..520: mol_type = other DNA

SEQ ID NO: 23630 - DNA, 732 bp, synthetic construct
  source 1..732: mol_type = other DNA
cgataccgcactgtgctacttcggtaccactctgcgggaatgacaatatgcccggtgtatagtttgcctgtttctcgcaccgttaccgctcgttcgggaatgtgaaactggcacccctcctctcccctaccaccctttctccttcgcccccattcataatttacaacgccgcacacagcggcggccgccaagggctagcctggcggttataaaaggaacctgggtctttccctcttcaagccaaaaggtaggttccctgtgtccctgaatgctcggtgaggaatgctgcaccgtaacgctttgtgaagtgtttgcaagttctggcccggcaagcctacagagtgctgtgatccgctgcggacgccatcctggtaacaggacccccagtgtgcgcaacagtatgttcagacttcggtttgttcacttgctttcatggaccattgcgcgaaagtgcgtgcgccatatccctgtacttcaggtgtgcttctctggaccctaggaatgctgcgaaggtaccccgtttcggcgggatctgatcgcaggctaattgtctatgggttcagtttcctttttctttactccacaattgactgcttaactgactctggatcttgtgcttccactgctctttctgctctcaaaacggcttcacttaccaactctcacctttcgaccaacaccatttacacactaacttttttcgactcttctgactcctggcttggtgaagac

SEQ ID NO: 23631 - DNA, 682 bp, synthetic construct
  source 1..682: mol_type = other DNA
cccggtgtatagtttgcctgtttctcgcaccgttaccgctcgttcgggaatgtgaaactggcacccctcctctcccctaccaccctttctccttcgcccccattcataatttacaacgccgcacacagcggcggccgccaagggctagcctggcggttataaaaggaacctgggtctttccctcttcaagccaaaaggtaggttccctgtgtccctgaatgctcggtgaggaatgctgcaccgtaacgctttgtgaagtgtttgcaagttctggcccggcaagcctacagagtgctgtgatccgctgcggacgccatcctggtaacaggacccccagtgtgcgcaacagtatgttcagacttcggtttgttcacttgctttcatggaccattgcgcgaaagtgcgtgcgccatatccctgtacttcaggtgtgcttctctggaccctaggaatgctgcgaaggtaccccgtttcggcgggatctgatcgcaggctaattgtctatgggttcagtttcctttttctttactccacaattgactgcttaactgactctggatcttgtgcttccactgctctttctgctctcaaaacggcttcacttaccaactctcacctttcgaccaacaccatttacacactaacttttttcgactcttctgactcctggcttggtgaagac

SEQ ID NO: 23632 - DNA, 632 bp, synthetic construct
  source 1..632: mol_type = other DNA
tgtgaaactggcacccctcctctcccctaccaccctttctccttcgcccccattcataatttacaacgccgcacacagcggcggccgccaagggctagcctggcggttataaaaggaacctgggtctttccctcttcaagccaaaaggtaggttccctgtgtccctgaatgctcggtgaggaatgctgcaccgtaacgctttgtgaagtgtttgcaagttctggcccggcaagcctacagagtgctgtgatccgctgcggacgccatcctggtaacaggacccccagtgtgcgcaacagtatgttcagacttcggtttgttcacttgctttcatggaccattgcgcgaaagtgcgtgcgccatatccctgtacttcaggtgtgcttctctggaccctaggaatgctgcgaaggtaccccgtttcggcgggatctgatcgcaggctaattgtctatgggttcagtttcctttttctttactccacaattgactgcttaactgactctggatcttgtgcttccactgctctttctgctctcaaaacggcttcacttaccaactctcacctttcgaccaacaccatttacacactaacttttttcgactcttctgactcctggcttggtgaagac

SEQ ID NO: 23633 - DNA, 582 bp, synthetic construct
  source 1..582: mol_type = other DNA
cattcataatttacaacgccgcacacagcggcggccgccaagggctagcctggcggttataaaaggaacctgggtctttccctcttcaagccaaaaggtaggttccctgtgtccctgaatgctcggtgaggaatgctgcaccgtaacgctttgtgaagtgtttgcaagttctggcccggcaagcctacagagtgctgtgatccgctgcggacgccatcctggtaacaggacccccagtgtgcgcaacagtatgttcagacttcggtttgttcacttgctttcatggaccattgcgcgaaagtgcgtgcgccatatccctgtacttcaggtgtgcttctctggaccctaggaatgctgcgaaggtaccccgtttcggcgggatctgatcgcaggctaattgtctatgggttcagtttcctttttctttactccacaattgactgcttaactgactctggatcttgtgcttccactgctctttctgctctcaaaacggcttcacttaccaactctcacctttcgaccaacaccatttacacactaacttttttcgactcttctgactcctggcttggtgaagac

SEQ ID NO: 23634 - DNA, 532 bp, synthetic construct
  source 1..532: mol_type = other DNA
tggcggttataaaaggaacctgggtctttccctcttcaagccaaaaggtaggttccctgtgtccctgaatgctcggtgaggaatgctgcaccgtaacgctttgtgaagtgtttgcaagttctggcccggcaagcctacagagtgctgtgatccgctgcggacgccatcctggtaacaggacccccagtgtgcgcaacagtatgttcagacttcggtttgttcacttgctttcatggaccattgcgcgaaagtgcgtgcgccatatccctgtacttcaggtgtgcttctctggaccctaggaatgctgcgaaggtaccccgtttcggcgggatctgatcgcaggctaattgtctatgggttcagtttcctttttctttactccacaattgactgcttaactgactctggatcttgtgcttccactgctctttctgctctcaaaacggcttcacttaccaactctcacctttcgaccaacaccatttacacactaacttttttcgactcttctgactcctggcttggtgaagac

SEQ ID NO: 23635 - DNA, 950 bp, synthetic construct; identical to SEQ ID NO: 21852
  source 1..950: mol_type = other DNA

SEQ ID NO: 23636 - DNA, 900 bp, synthetic construct; identical to SEQ ID NO: 21853
  source 1..900: mol_type = other DNA

SEQ ID NO: 23637 - DNA, 850 bp, synthetic construct; identical to SEQ ID NO: 21854
  source 1..850: mol_type = other DNA

SEQ ID NO: 23638 - DNA, 800 bp, synthetic construct; identical to SEQ ID NO: 21855
  source 1..800: mol_type = other DNA

SEQ ID NO: 23639 - DNA, 750 bp, synthetic construct; identical to SEQ ID NO: 21856
  source 1..750: mol_type = other DNA

SEQ ID NO: 23640 - DNA, 700 bp, synthetic construct; identical to SEQ ID NO: 21857
  source 1..700: mol_type = other DNA

SEQ ID NO: 23641 - DNA, 650 bp, synthetic construct; identical to SEQ ID NO: 21858
  source 1..650: mol_type = other DNA

SEQ ID NO: 23642 - DNA, 600 bp, synthetic construct; identical to SEQ ID NO: 21859
  source 1..600: mol_type = other DNA

SEQ ID NO: 23643 - DNA, 550 bp, synthetic construct; identical to SEQ ID NO: 21860
  source 1..550: mol_type = other DNA

SEQ ID NO: 23644 - DNA, 500 bp, synthetic construct; identical to SEQ ID NO: 21861
  source 1..500: mol_type = other DNA

SEQ ID NO: 23645 - DNA, 679 bp, synthetic construct; identical to SEQ ID NO: 22264
  source 1..679: mol_type = other DNA

SEQ ID NO: 23646 - DNA, 629 bp, synthetic construct; identical to SEQ ID NO: 22265
  source 1..629: mol_type = other DNA

SEQ ID NO: 23647 - DNA, 579 bp, synthetic construct; identical to SEQ ID NO: 22266
  source 1..579: mol_type = other DNA

SEQ ID NO: 23648 - DNA, 529 bp, synthetic construct; identical to SEQ ID NO: 22267
  source 1..529: mol_type = other DNA

SEQ ID NO: 23649 - DNA, 705 bp, synthetic construct; identical to SEQ ID NO: 23202
  source 1..705: mol_type = other DNA

SEQ ID NO: 23650 - DNA, 655 bp, synthetic construct; identical to SEQ ID NO: 23203
  source 1..655: mol_type = other DNA

SEQ ID NO: 23651 - DNA, 605 bp, synthetic construct; identical to SEQ ID NO: 23204
  source 1..605: mol_type = other DNA

SEQ ID NO: 23652 - DNA, 555 bp, synthetic construct; identical to SEQ ID NO: 23205
  source 1..555: mol_type = other DNA

SEQ ID NO: 23653 - DNA, 505 bp, synthetic construct; identical to SEQ ID NO: 23206
  source 1..505: mol_type = other DNA

SEQ ID NO: 23654 - DNA, 746 bp, synthetic construct
  source 1..746: mol_type = other DNA
tttaaaacagcctgtgggttgtacccacccacagggcccactgggcgctagcactctgattccacgggatccttgtgcgcctgttttatatcccctccccaagttgtaacttagaagtattacactacaatgatcagtagcaggcgtggcgcaccagccatgtctcgatcaagcacttctgtttccccggaccgagtatcaatagactgctaacgcggttgaaggagaaaacgttcgttatccggctaactacttcgagaaacctagtagcaccatcgaagctgcggggcgtttcgctcagcacttcccccgtgtagatcaggtcgatgagtcactgcaatcctcacgggcgaccgtggcagtggctgcgttggcggcctgcctatggggcaacccataggacgcttcaaagtggacatggtgtgaagagtctattgagctagttagtagtcctccggcccctgaatgcggctaatcctaactgcggagcacataccttcaatccagaaggtagtgtgtcgtaacgggcaactctgcagcggaaccgactactttgggtgtccgtgtttccttttattctcttattggctgcttatggtgacaattgaagaattgttaccatatagctattggattggccatccagtgtctaacagagcaattgtgtacttatttgctggttttgttcctttgtcttacacgtctcttagcactttgtattacattataaaactgaactcggaaag

SEQ ID NO: 23655 - DNA, 742 bp, synthetic construct; identical to SEQ ID NO: 19081
  source 1..742: mol_type = other DNA

SEQ ID NO: 23656 - DNA, 922 bp, synthetic construct
  source 1..922: mol_type = other DNA
gcggccgcgaattcaaaagctagagtcgactctagggagtggggaggcacgatggccgctttggtcgaggcggatccggccattagccatattattcattggttatatagcataaatcaatattggctattggccattgcatacgttgtatccatatcataatatgtacatttatattggctcatgtccaacattaccgccatgttgacattgattattgactagttattaatagtaatcaattacggggtcattagttcatagcccatatatggagttccgcgttacataacttacggtaaatggcccgcctggctgaccgcccaacgacccccgcccattgacgtcaataatgacgtatgttcccatagtaacgccaatagggactttccattgacgtcaatgggtggagtatttacggtaaactgcccacttggcagtacatcaagtgtatcatatgccaagtacgccccctattgacgtcaatgacggtaaatggcccgcctggcattatgcccagtacatgaccttatgggactttcctacttggcagtacatctacgtattagtcatcgctattaccatggtgatgcggttttggcagtacatcaatgggcgtggatagcggtttgactcacggggatttccaagtctccaccccattgacgtcaatgggagtttgttttggcaccaaaatcaacgggactttccaaaatgtcgtaacaactccgccccattgacgcaaatgggcggtaggcgtgtacggtgggaggtctatataagcagagctcgtttagtgaaccgtcagatcgcctggagacgccatccacgctgttttgacctccatagaagacaccgggaccgatccagcctccgcggccccaagctagtcgactttaagcttctcgagaattcgtgcacc

SEQ ID NO: 23657 - DNA, 742 bp, synthetic construct; identical to SEQ ID NO: 19241
  source 1..742: mol_type = other DNA

SEQ ID NO: 23658 - DNA, 742 bp, synthetic construct; identical to SEQ ID NO: 19236
  source 1..742: mol_type = other DNA

SEQ ID NO: 23659 - DNA, 742 bp, synthetic construct; identical to SEQ ID NO: 19247
  source 1..742: mol_type = other DNA

SEQ ID NO: 23660 - DNA, 712 bp, synthetic construct; identical to SEQ ID NO: 19170
  source 1..712: mol_type = other DNA

SEQ ID NO: 23661 - DNA, 742 bp, synthetic construct; identical to SEQ ID NO: 19264
  source 1..742: mol_type = other DNA

SEQ ID NO: 23662 - DNA, 742 bp, synthetic construct; identical to SEQ ID NO: 19227
  source 1..742: mol_type = other DNA

SEQ ID NO: 23663 - DNA, 742 bp, synthetic construct; identical to SEQ ID NO: 19225
  source 1..742: mol_type = other DNA

SEQ ID NO: 23664 - DNA, 743 bp, synthetic construct; identical to SEQ ID NO: 19200
  source 1..743: mol_type = other DNA

SEQ ID NO: 23665 - DNA, 714 bp, synthetic construct; identical to SEQ ID NO: 21572
  source 1..714: mol_type = other DNA

SEQ ID NO: 23666 - DNA, 645 bp, synthetic construct; identical to SEQ ID NO: 19072
  source 1..645: mol_type = other DNA

SEQ ID NO: 23667 - DNA, 1000 bp, synthetic construct
  source 1..1000: mol_type = other DNA
cattatgctacagttcccgcccgggacaactgacaccccattaggctacaacatggccgaaaagggtgttgggtccccccggattgtgtctgttcatagtgtgtgtaacgtggtttaccatctccactaacattggactaagcatttcatctttcctccccgattgtgtactcacttggctaacgctgggtggtcgcggttgggtccttgatttactttttctcgtctaagcattccaactgtcctccccgattatgtgctcattcagttaactgctgggtggtcatgactaacatcgaggaatcttctgtccacgcttactttgagctccggtcgcttgacgcttgtagggcgatagggttatcttcctgacaacatctttattctacctccataggctctatctatggagacggagtgtggcacccgtcccttctttgggagcttcggtagtgacgccctttgtcactctcgccagccgaggcatgcctggtgccaggtagcaaagaaagcatatgcttaaggacttgactgatttagcgcaagagtttgtagtgatgtccatagtgtctgcggatcccccacacggcgacgtgtgccgcggaggccaaaagccacggtgttcacagcacccctatggatgcccacagaccccagtgggcactcttgttgccggactttcaggaaattaggtataggctcttctcaaactcctggcattggactaggtaagaatgccccggaggtaccccagtactccttcgggagtctgggatctgaccgggggccccacaaacatgctttacgtgtttcgtgcggtcaaaaattgtctaactagtcccaaccttgaacaagggattgttctttcctttttattactgagactggcctatggtgacaacagagattgactgcaaatacagttattttctggtgttcatcatttggattttctcactgctcttttacctttgtggtatttgttcactcaacaagcaag

SEQ ID NO: 23668 - DNA, 581 bp, synthetic construct; identical to SEQ ID NO: 18945
  source 1..581: mol_type = other DNA

SEQ ID NO: 23669 - DNA, 632 bp, synthetic construct
  source 1..632: mol_type = other DNA
ggtaccctatcgtcgcctgttttatttcccttcccccgtaacgttagaagaaagtacaattgacaaatagtaaatccaccaacccaggtgggttttcgtcaagcacttctgtttccccggacctagtaccaataagctgtatccacggctgaaggggaaaacgttcgttacccggctacctacttcgagaagcctagtaccatcattgaatgtctcaagtgttacgttcagcacaaccccagtgtagttcaggtcgatgagtcaccgagatccccacgggcgaccgtgtcggtggctgcgttggcggcctgcctgtgagttttgctcacaggacgcttgattcatgacatggtgcgaagagcctattgagctaggtagtagtcctccggcccctgaatgcggctaatcctaaccacggagccatgcgttgcaaaccagcgacgttgtggtcgtaacgagcaattctgtggcggaaccgactactttgggtgtccgtgtttcctgttttacttaccttggctgcttatggtgacaattatatagttgtcatcatatagctattggattggccatccggttatataaaatcacttattacttgctcaagcaattcttatctaatcacagataaa

SEQ ID NO: 23670 - DNA, 574 bp, synthetic construct
  source 1..574: mol_type = other DNA
caaatgacaaatagtaaatccaccaacccaggtgggttttcgtcaagcacttctgtttccccggacctagtaccaataagctgtacccacggctgaaggggaaaacgttcgttacccggctacctacttcgagaagcctagtaccatcattgaatgtctcaagtgttacgttcagcacaaccccagtgtagttcaggtcgatgagtcaccgaattccccacgggcgaccgtgtcggtggctgcgttggcggcctgcctgtgagtttcactcacaggacgcttgattcatgacatggtgcgaagagcctattgagctaggtagtagtcctccggcccctgaatgcggctaatcctaaccacggagccatgcgttgcaaaccagtaacgttatggtcgtaacgagcaattctgtggcggaaccgactactttgggtgtccgtgtttcctgttttatttaccttggctgcttatggtgacaattgtatagttgtcatcatatagctattggattggccatccggatacacaatcacttgctacttgtccaaacaactctcttttggatacaagcata

SEQ ID NO: 23671 - DNA, 742 bp, synthetic construct; identical to SEQ ID NO: 18511
  source 1..742: mol_type = other DNA

SEQ ID NO: 23672 - DNA, 743 bp, synthetic construct; identical to SEQ ID NO: 19705
  source 1..743: mol_type = other DNA

SEQ ID NO: 23673 - DNA, 688 bp, synthetic construct; identical to SEQ ID NO: 20380
  source 1..688: mol_type = other DNA

SEQ ID NO: 23674 - DNA, 744 bp, synthetic construct; identical to SEQ ID NO: 18521
  source 1..744: mol_type = other DNA

SEQ ID NO: 23675 - DNA, 732 bp, synthetic construct
  source 1..732: mol_type = other DNA
gtgggttgttcccacccacagggcccattgggcgccagcacactggtatcacggtacccttgtgcgcctgttttatctaccccctcccccaatgtaacgtagaagcacaaatcaagtggtcaatagatggcccagtatgccaactgggtttagaccaagcacttctgtcaacccggactgagtatcaataagctgctcacgcggctgaaggagaaaacgttcgttacccggccaactacttcgagaagcctagtaccaccatgaaggatgcgcagtgtttcgttcagcacaaccccagtgtagatcaggtcgatgagtcaccgcaatccccacgggcgaccgtggcggtggctgcgctggcggcctgcccatgaggttactcatgggacgcttcaattcagacatggtgcgaagagcctattgagctagttggtagtcctccggcccctgaatgcggctaatcccaactgcggagcaagcacccacaaaccagtgggctgtttgtcgtaacgggcaactctgcagcggaaccgactactttgggtgtccgtgtttccttttattcctacactggctgcatatggtgacaattgaaagattgttgccatatagctattggattggccacccggtgacaagcagagccattatctacttgtttgtcggctttgtaccgttgagtttcaaagttgtaagaaccctaatctttatcttaacactcaacacagcaaa

SEQ ID NO: 23676 - DNA, 720 bp, synthetic construct; identical to SEQ ID NO: 18746
  source 1..720: mol_type = other DNA

SEQ ID NO: 23677 - DNA, 743 bp, synthetic construct; identical to SEQ ID NO: 19667
  source 1..743: mol_type = other DNA

SEQ ID NO: 23678 - DNA, 742 bp, synthetic construct; identical to SEQ ID NO: 19697
  source 1..742: mol_type = other DNA

SEQ ID NO: 23679 - DNA, 654 bp, synthetic construct; identical to SEQ ID NO: 20737
  source 1..654: mol_type = other DNA

SEQ ID NO: 23680 - DNA, 618 bp, synthetic construct
  source 1..618: mol_type = other DNA
gatcaacagtaggtgttacataccagtcatacctcgatcaagcacttctgtttccccggactgagtatcaataggctgctcgcgcggctgaaagagaaaacgttcgttacccggccaactacttcgagaagcttagtaccaccatgaacgaggcagagcgtttcgctcggcacaaccccagtgtagatcaggctgatgagtcactgcaatccccatgggcgaccatggcagtggctgcgttggcggcctgcccatggagaaatccatgggacgctctaattttgacatggtgcgaagagcctattgagctagctggtagtcctccggcccctgaatgcggctaatccctaactgcggagcacacacccacaaaccagtgggcagtgtgtcgtaacgggcaactctgcagcggaaccgactactttgggtgtccgtgtttccttttatttttatgttggctgcttatggtgacaatcaaagagttgttaccatatagctattggattggccatccggtgtgcaacagagcaattgtttacctatttattggttttgtaccattgacactgaagtctgtggtcacccgtaattttatcttgaacctcaacgcagtcaaac

SEQ ID NO: 23681 - DNA, 737 bp, synthetic construct; identical to SEQ ID NO: 19755
  source 1..737: mol_type = other DNA

SEQ ID NO: 23682 - DNA, 716 bp, synthetic construct; identical to SEQ ID NO: 21444
  source 1..716: mol_type = other DNA

SEQ ID NO: 23683 - DNA, 744 bp, synthetic construct; identical to SEQ ID NO: 18260
  source 1..744: mol_type = other DNA

SEQ ID NO: 23684 - DNA, 705 bp, synthetic construct
  source 1..705: mol_type = other DNA
ctgggcgctagcacactggtatcacggtacctttgtgcgcctgttttatccaccctaaccccaagtcaacatagaagcataccgcaaaaggtcaataggtgacccagcactccagctgggttttgaccaagcacttctgttaccccggactgagtaccaataagctgctcgcgcggctgaaagggaaaacgttcgttacccggccaattacttcgaaaaacctagtacaaccatgaaagttgcgcagcgtttcgctccgcacaaccccagtgtagatcaggctgatgagtcaccgcattccccacgggcgaccgtggcggtggctgcgctggcggcctgcctatggggcaacccataggacgcttcaatactgacatggtttgaagagtctattgagctaattggtagtcctccggcccctgaatgcggctaatcctaactgcggagcagatacccacacaccagtgggcagtctgtcgtaatgggcaactctgcagcggaaccgactactttgggtgtccgtgtttccttttattcttacactggctgcttatggtgacaattgagagattgttaccatatagctattggattggccatccggtgacaagtagagcaatcgtctacctattttgttgggttttgttccattaaattttaagttttgaaaacccttgactttatcttagcactcaatacggcaaa

SEQ ID NO: 23685 - DNA, 667 bp, synthetic construct; identical to SEQ ID NO: 20715
  source 1..667: mol_type = other DNA

SEQ ID NO: 23686 - DNA, 742 bp, synthetic construct; identical to SEQ ID NO: 19680
  source 1..742: mol_type = other DNA

SEQ ID NO: 23687 - DNA, 728 bp, synthetic construct
  source 1..728: mol_type = other DNA
gggttgttcccacccacagggcccactgggcgctagcacactggtatcgtggtacctttgtgcgcctgttttatccaccctgaccccaaggcaacgtagaagcataccactaaaggtcaataggcgatccagcactccagctgggttatgaccaagcacttctgttaccccggaccgagtaccaataagctgctcacgcggctgaaggggaaagcgttcgttacccaaccaattacttcgagaaacctagtaccaccgtgaaagttgcgcagcgtttcgctcagcacaaccccagtgtagatcaggctgatgagtcaccgcattccccacgggcgaccgtggcggtggctgcgttggcggcctgcccatggggcaacccatgggacgcttcaatactgacatggtgtgaagagtctattgagctaattggtagtcctccggcccctgaatgcggctaatcctaactgcggagcagatacccacacaccagtgggcagtctgtcgtaatgggtaactctgcagcggaaccgactactttgggtgtccgtgtttccttttaatttatactggctgcttatggtgacaattgatagattgttaccatatagctattggattggccatccagtgacaagcagagctatcatttacctgtttgttggttttgtcccattgaattttaaagttctaaaaactattgactttatcttagcactcaatacggcaaa

SEQ ID NO: 23688 - DNA, 618 bp, synthetic construct
  source 1..618: mol_type = other DNA
gatcaacagtaggtgtgacacaccagtcatatcttgatcaagcacttctgtttccccggactgagtatcaataggctgctcgcgcggctgaaggagaaaacgttcgttacccggccaactacttcgagaagcttagtaccaccatgaacgaggcagagtgtttcgttcagcacaaccccagtgtagatcaggctgatgagtcactgcaatccccatgggcgaccatggcagtggctgcgttggcggcctgcccatggagaaatccatgggacgctctaattctgacatggtgcgaagagcctattgagctagctggtagtcctccggcccctgaatgcggctaatccccaactgcggagcacacgctcacaagccagtgggtggtgtgtcgtaacgggcaactctgcagcggaaccgactactttgggtgtccgtgtttccttttattcttatattggctgcttatggtgacaatcaaagaattgttaccatatagctattggattggccatccggtgtgcaatagagcaattgtttatctatttgttggtttcgtgccattgacactgaagtctgtgatcacccgtaactttatcttgaccctcaacacaattaaac

SEQ ID NO: 23689 - DNA, 618 bp, synthetic construct
  source 1..618: mol_type = other DNA
gatcaacagtaggtgtgacataccagtcatatcttgatcaagcacttctgtttccccggactgagtatcaataagctgctcgcgcggctgaaagagaaaacgttcgttacccggccaactacttcgagaagcttagtaccaccatgaacgaggcggagtgtttcgctcggcacaaccccagtgtagatcaggctgatgagtcactgcaatccccatgggcgaccatggcagtggctgcgttggcggcctgcccatggagaaatccatgggacgctctaattctgacatggtgcgaagagcctattgagctagctggtagtcctccggcccctgaatgcggctaatccctaactgcggagcacacacccacaaaccagtgggcagtgtgtcgtaacgggcaactctgcagcggaaccgactactttgggtgtccgtgtttccttttatccttatgttggctgcttatggtgacaatcaaagagttgttaccatatagctattggattggccatccggtgtgcaacagagcaattgtttacctatttattggttttgtaccattgacactgaagtctgtgatcacccgcaattttatcttgaccctcaacacagtcaaac

SEQ ID NO: 23690 - DNA, 747 bp, synthetic construct; identical to SEQ ID NO: 19612
  source 1..747: mol_type = other DNA

SEQ ID NO: 23691 - DNA, 742 bp, synthetic construct; identical to SEQ ID NO: 19722
  source 1..742: mol_type = other DNA

SEQ ID NO: 23692 - DNA, 742 bp, synthetic construct; identical to SEQ ID NO: 19688
  source 1..742: mol_type = other DNA

SEQ ID NO: 23693 - DNA, 742 bp, synthetic construct; identical to SEQ ID NO: 19765
  source 1..742: mol_type = other DNA

SEQ ID NO: 23694 - DNA, 742 bp, synthetic construct; identical to SEQ ID NO: 19447
  source 1..742: mol_type = other DNA

SEQ ID NO: 23695 - DNA, 743 bp, synthetic construct; identical to SEQ ID NO: 1050
  source 1..743: mol_type = other DNA

SEQ ID NO: 23696 - DNA, 743 bp, synthetic construct; identical to SEQ ID NO: 19606
  source 1..743: mol_type = other DNA

SEQ ID NO: 23697 - DNA, 728 bp, synthetic construct
  source 1..728: mol_type = other DNA
ggttgaacccacccacagggcccactgggcgctagcactctggtatcacggtacctttgtgcgcctgttttatatccccttaccccaattgcaacttagaagatgtacatactgatcaatagtgggcatagcacaccagttatgtcttgatcaagcactcctgtatccccggaccaagtatcaatagaccgctcacgcggttgaaggagaaaacgttcgttacccggctaactacttcgagaaacccagtagtatcatgaaagttgcgaggcgtttcgttcagcacatccccagtgtagatcaggtcgatgagtcaccgcgtcccccacgggcgaccgtggcggtggctgcgctggcggcctgcctacggggcaacccgtaggacgcttcaatacagacatggtgcgaagagtcgattgagctagttagtagtcctccggcccctgaatgcggctaatcctaactgcggagcacatgccctcaacccagggggtattgtgtcgtaacgggcaactctgcagcggaaccgactactttgggtgtccgtgtttccttttattcttgtactggctgcttatggtgacaattgaaagattgttaccatatagctattggattggccatccagtgtctaatagagctattgtttatctctttgttggatttataccactcaacctaaaagaagttaaaacactacaactcattatacaactgaatacagcaag

SEQ ID NO: 23698 - DNA, 728 bp, synthetic construct
  source 1..728: mol_type = other DNA
gggttgtacccacccacagggcccactgggcgatagcactctggtatcacggtacctttgtgcgcctgttttatatcccccttcccaattgtaacttagaagatgtacacactgatcaatagtgggcatagcacaccagctatgtcttgatcaagcacttctgtatccccggaccaagtatcaatagactgctcacgcggttgaaggagaaaatgttcgttacccggctaactacttcgaaaaacccagtagtatcatgaaagttgcgaggcgtttcgttcagcacatccctagtgtagatcaggtcgatgagtcaccgcatcccccacgggcgaccgtggcggtggctgcgctggcggcctgcctacggggcaacccgtaggacgcttcaatacagacatggtgcgaagagtcgattgagctagttagtagtcctccggcccctgaatgcggctaatcctaactgcggagcacatgccctcaacccagggggtattgtgtcgtaacgggcaactctgcagcggaaccgactactttgggtgtccgtgtttccttttatttttatactggctgcttatggtgacaattgtaagattgttaccatatagctattggattggccatccagtgtctaatagagctatcatttacctctttgttggatttataccacttaacctaaaagaagttaaaacactacagctcattatacaactgaacacagcaaa

SEQ ID NO: 23699 - DNA, 743 bp, synthetic construct; identical to SEQ ID NO: 1049
  source 1..743: mol_type = other DNA

SEQ ID NO: 23700 - DNA, 742 bp, synthetic construct; identical to SEQ ID NO: 19485
  source 1..742: mol_type = other DNA

SEQ ID NO: 23701 - DNA, 731 bp, synthetic construct
  source 1..731: mol_type = other DNA
gtgggttgtacccgcccacaggacccactgggtgctagcactctggtaccgcggtacctttgtgtgcctgttttatatccccttccccaaattgcaacttagaagctgcacacactgatcaatagagggcgtagcacaccagctatgtcttgatcaagcactcctgtatccccggactaagtatcaatagactgctcacgcggttgaaggagaaaacgttcgttacccggctaactacttcgagaaacccagtagtaccatgaaagttgcgaggcgtttcgttcggcacattcccagtgtagatcaggtcgatgagtcaccgcgttccccacgggtgaccgtggcggtggctgcgttggcggcctgcctacggggcgacccgtaggacgcttcaatacggacatggtgcgaagagtcgattgagctagttagtagtcctccggcccctgaatgcggctaatcctaactgcggagcacatgccctcaacccagggggtattgtgtcgtaacgggcaactctgcagcggaaccgactactttgggtgtccgtgtttccttttattcttacatcggctgcttatggtgacaattgaaaggttgttaccatatagctattggattggccatccattgtctaatagagctattatatacctctttgttggatttataccacttaacctaaaagaagtcaagacactacaacttattatacaactgaatacagcaag

SEQ ID NO: 23702 - DNA, 725 bp, synthetic construct
  source 1..725: mol_type = other DNA
tgtacccacccacagggcccactgggcgctagcactctggtatcacggtacctttgtgcgcctgttttatgtcccctttccctaattgcaacttagaagatgtacacaatgatcaatagcgggcgtagcacaccagctatgtcttgatcaagcactcctgtttccccggaccaagtatcaatagactgctcacgcggttgaaggagaaaacgttcgtcacccggctaactacttcgagaaacccagtagtatcatgaaagttgcgaggcgtttcgttcagcacatccccagtgtagatcaggccgatgagtcaccgcgttccccacgggcgaccgtggcggtggctgcgctggcggcctgcctacggggcgacccgtaggacgcttcaatacagacatggtgcgaagagtcgattgagctagttagtggtcctccggcccctgaatgcggctaatcctaactgcggagcacatgccctcaacccagggggtattgtgtcgtaacgggcaactctgcagcggaaccgactactttgggtgtccgtgtttccttttattctcatactggctgcttatggtgacaattgaaagattgttaccatatagctattggattggccatccagtgtctaacagagctattatttacctctttgctggatttataccactcaacctaaaagaagttaagacactacaactcattatacaactgaacacagcaaa

SEQ ID NO: 23703 - DNA, 744 bp, synthetic construct; identical to SEQ ID NO: 19754
  source 1..744: mol_type = other DNA

SEQ ID NO: 23704 - DNA, 727 bp, synthetic construct
  source 1..727: mol_type = other DNA
gttgaacccacccacagggcccactgggcgctagcactctggtattacggtacctttgtgcgcctgttttatacccccttccccaaattgcaacttagaagatgtgcacactgatcaatagcgggcgtagcacaccagctgtgtcttgatcaagcactcctgtctccccggaccgagtatcaatagactgctcacgcggttgaaggagaaaatgttcgtcatccggctaactacttcgagaaacccagtagtgtcatgaaagttgcgaggcgtttcgttcagcacatccccagtgtagatcaggctgatgagtcaccgcgttccccacgggcgaccgtggcggtggctgcgctggcggcctgcctacggggagacccgtaggacgcttcaatacagacatggtgcgaagagtcgattgagctagttagtagtcctccggcccctgaatgcggctaatcctaactgtggagcacatgccctcaacccagggggtattgtgtcgtaatgggcaactctgcagcggaaccgactactttgggtgtccgtgtttccttttattcttatactggctgcttatggtgacaattgaaaaattgttaccatatagctattggattggccatccagtgactaacagagctattgtttacctctttgttgggtttatatcactcaacctaaaagaagttaagacactaaaactcattatacaactgaacacagcaaa

SEQ ID NO: 23705 - DNA, 742 bp, synthetic construct; identical to SEQ ID NO: 19766
  source 1..742: mol_type = other DNA

SEQ ID NO: 23706 - DNA, 742 bp, synthetic construct; identical to SEQ ID NO: 19421
  source 1..742: mol_type = other DNA

SEQ ID NO: 23707 - DNA, 742 bp, synthetic construct; identical to SEQ ID NO: 19316
  source 1..742: mol_type = other DNA

SEQ ID NO: 23708 - DNA, 735 bp, synthetic construct
  source 1..735: mol_type = other DNA
tgtgggttgtacccactcacagggcccactgggcgctagcactctgattctgcggaatctttgtgcgcctgttttacaacccctcccccaatttgtaatttagaagtagtgcacatcaccgatcaacagcaagcgtggcgcaccagccatgtttagatcaagcacttctgtttccccggactgagtatcaatagactgctcacgcggttgaaggagaaaacgttcgttacccgactaactacttcgagaaacctagtagcaccatcgaaactgcagagtgtttcgctcagcacttcccccgtgtagatcaggtcgatgagtcactgcaatccccacgggcgaccgtggcagtggctgcgttggcggcctgcctatgggcttacccataggacgccctaatgtggacatggtgtgaagagtctattgagctagttagtagtcctccggcccctgaatgcggctaatcctaactgcggagcgcataccctcaatccagggggtggtgtgtcgtaacgggcaactctgcagcggaaccgactactttgggtgtccgtgtttccttttattcttacattggctgcttatggtgacaattgagaaattgttaccatatagctattggattggccatccagtgtctaacagagcaattgtatacttatttgttggattcattccactatcatacacatccattaataccctatactacatcataagattgaacacaagaaa

SEQ ID NO: 23709 - DNA, 732 bp, synthetic construct; identical to SEQ ID NO: 19585
  source 1..732: mol_type = other DNA

SEQ ID NO: 23710 - DNA, 709 bp, synthetic construct; identical to SEQ ID NO: 19932
  source 1..709: mol_type = other DNA

SEQ ID NO: 23711 - DNA, 743 bp, synthetic construct; identical to SEQ ID NO: 18458
  source 1..743: mol_type = other DNA

SEQ ID NO: 23712 - DNA, 742 bp, synthetic construct; identical to SEQ ID NO: 19088
  source 1..742: mol_type = other DNA

SEQ ID NO: 23713 - DNA, 748 bp, synthetic construct; identical to SEQ ID NO: 18027
  source 1..748: mol_type = other DNA

SEQ ID NO: 23714 - DNA, 744 bp, synthetic construct; identical to SEQ ID NO: 19362
  source 1..744: mol_type = other DNA

SEQ ID NO: 23715 - DNA, 747 bp, synthetic construct; identical to SEQ ID NO: 17990
  source 1..747: mol_type = other DNA

SEQ ID NO: 23716 - DNA, 744 bp, synthetic construct; identical to SEQ ID NO: 19577
  source 1..744: mol_type = other DNA

SEQ ID NO: 23717 - DNA, 743 bp, synthetic construct; identical to SEQ ID NO: 19437
  source 1..743: mol_type = other DNA

SEQ ID NO: 23718 - DNA, 742 bp, synthetic construct; identical to SEQ ID NO: 18320
  source 1..742: mol_type = other DNA

SEQ ID NO: 23719 - DNA, 743 bp, synthetic construct; identical to SEQ ID NO: 1043
  source 1..743: mol_type = other DNA

SEQ ID NO: 23720 - DNA, 736 bp, synthetic construct; identical to SEQ ID NO: 18100
  source 1..736: mol_type = other DNA

SEQ ID NO: 23721 - DNA, 744 bp, synthetic construct; identical to SEQ ID NO: 19735
  source 1..744: mol_type = other DNA

SEQ ID NO: 23722 - DNA, 747 bp, synthetic construct
  source 1..747: mol_type = other DNA
tttaaaacagcctgtgggttgcacccactcacagggcccactgggcgttagcactctgattctacggaatctttgtgcgcctgttttataacccctcccccgattcgtaacttagaagtaacacacactattgatcaacagcaagcgtggcgcgccagccatgtttagatcaagcacttctgtttccccggactgagtatcaatagactgctcacgcggttgaaggagaaaacgttcgttacccggctaactacttcgagaaacctagtagcaccatcgaaactgcagagtgtttcgttcagcacttcccccgtgtagatcaggtcgatgagtcactgctacccccacgggcgaccgtggcagtggctgcgttggcggcctgcctatgggcttacccataggacgctctaatgtggacatggtgtgaagagtctattgagctagttagtagtcctccggcccctgaatgcggctaatcctaactgcggagcgcataccctcaatccagggggtggtgcgtcgtaacgggtaactctgcagcggaaccgactactttgggtgtccgtgtttccttttattcttatattggctgcttatggtgacaattgagagattgttaccatatagctattggattggccatccagtgtctaacagagcaattgtacacctatttgttggattcattccactatcatatacatccatcaataccttacactacattataaaattgaactcaaggaa

SEQ ID NO: 23723 - DNA, 747 bp, synthetic construct
  source 1..747: mol_type = other DNA
tttaaaacagcctgtgggttgtacccactcacagggcccactgggcgctagcactctgattctgcggaatctttgtgcgcctgttttataacccctcccccaatccgtaatttagaagtaatgcacaccattgatcaacagcaagcgtggcgcgccagccatgtttagatcaagtacttctgttttcccggactgagtatcaatagactgctcacgcggttgaaggagaaaacgttcgttacccggctaactacttcgagaaacccagtagcaccatcgaaactgcagagtgtttcgctcagcactttccccgtgtagatcaggtcgatgagtcactgcaatccccacgggcgaccgtggcagtggctgcgttggcggcctgcctatgggcttacccataggacgctctaatgtggacatggtgtgaagagtctattgagctagttagtagtcctccggcccctgaatgcggctaatcctaactgcggagcgcataccctcaatccagggggtggtgcgtcgtaacgggcaactctgcagcggaaccgactactttgggtgtccgtgtttccttttattcttatgttggctgcttatggtgacaattgagagattgttaccatatagctattggattggccatccagtgtctaacagagcaattgtatacttatttgttggattcgttccactatcatatacatccactaacactttatactacattataagattgaacacaagaaa

SEQ ID NO: 23724 - DNA, 743 bp, synthetic construct; identical to SEQ ID NO: 18289
  source 1..743: mol_type = other DNA

SEQ ID NO: 23725 - DNA, 745 bp, synthetic construct; identical to SEQ ID NO: 18310
  source 1..745: mol_type = other DNA

SEQ ID NO: 23726 - DNA, 729 bp, synthetic construct; identical to SEQ ID NO: 18517
  source 1..729: mol_type = other DNA

SEQ ID NO: 23727 - DNA, 747 bp, synthetic construct; identical to SEQ ID NO: 17995
  source 1..747: mol_type = other DNA

SEQ ID NO: 23728 - DNA, 746 bp, synthetic construct
  source 1..746: mol_type = other DNA
ttaaaacagcctgtgggttgcacccactcacagggcccacgtggcgctagcactctggttttacggaacctttgtgcgcctgttttacaaccccccccaatttgcaacttagaagcaatacacaacactgatcaacagcaggcatggcgcaccagccatgtcttgatcaagcacttctgtttccccggactgagtatcaatagactgctcacgcggttgaaggagaaagcgtccgttatccggctaactacttcgagaaacctagtagcaccattgaaactgcggagtgtttcgctcggcacttcccccgtgtagatcaggtcgatgagtcactgcaatccccacgggcgaccgtggcagtggctgcgctggcggcctgcctatggggcaacccataggacgctctaatgtggacatggtgcgaagagtctattgagctagttagtagtcctccggcccctgaatgcggctaatcctaactgcggagcacatgccctcaacccagagggtagtgtgtcgtaacgggcaactctgcagcggaaccgactactttgggtgtccgtgtttccttttattcttacattggctgcctatggtgacaatcgcagaattgttaccatatagctattggattggccatccggtgtgcaatagagctattatatacctatttgttggctttgtaccattaaccttaaaatctataactaccctcaactttgtattaactctcaatacagtcaaac

SEQ ID NO: 23729 - DNA, 750 bp, synthetic construct; identical to SEQ ID NO: 1205
  source 1..750: mol_type = other DNA

SEQ ID NO: 23730 - DNA, 747 bp, synthetic construct; identical to SEQ ID NO: 19095
  source 1..747: mol_type = other DNA

SEQ ID NO: 23731 - DNA, 700 bp, synthetic construct
  source 1..700: mol_type = other DNA
ggggttgttcccaccctagaggcccacgtggcggccagtactctggtatcacggtacctttgtacgcctgttttatatccctttccccgtaacttagaagaaaacaattcaagttcactaggagggggtacaaaccagtaccaccacgaacaagcacttctgtttccccggtgatgttgtataaactgtacccacggttgaaaacgactgatccgttatccgctcttgtacttcgagaagcccagtatcaccttgggatcttcgatgcgttgcgttcagcactcaaccccagagtgtagcttaggtcgatgagtctggacactccccaccggcgacggtggtccaggctgcgttggcggcctacctgtggcccaaagccacaggacgctagttgtgaacaaggtgtgaagagcctattgagctacaagagagtcctccggcccctgaatgcggctaatcctaaccacggagcaagagtgcacaaaccagtacatgtcttgtcgtaacgcgcaagtctgtggcggaaccgactactttgggtgtccgtgtttccttttatttttatcatggctgcttatggtgacaatctaagattgttatcatatagctattggattggccatccggtaattcgttgagatttgagcatttgcttattcctttaacaattttaactgttcactacactccaacagtcaaa

SEQ ID NO: 23732 - DNA, 746 bp, synthetic construct; identical to SEQ ID NO: 1137
  source 1..746: mol_type = other DNA

SEQ ID NO: 23733 - DNA, 750 bp, synthetic construct; identical to SEQ ID NO: 1204
  source 1..750: mol_type = other DNA

SEQ ID NO: 23734 - DNA, 734 bp, synthetic construct; identical to SEQ ID NO: 19229
  source 1..734: mol_type = other DNA

SEQ ID NO: 23735 - DNA, 747 bp, synthetic construct; identical to SEQ ID NO: 1161
  source 1..747: mol_type = other DNA

SEQ ID NO: 23736 - DNA, 748 bp, synthetic construct; identical to SEQ ID NO: 19080
  source 1..748: mol_type = other DNA

SEQ ID NO: 23737 - DNA, 748 bp, synthetic construct; identical to SEQ ID NO: 1181
  source 1..748: mol_type = other DNA

SEQ ID NO: 23738 - DNA, 747 bp, synthetic construct; identical to SEQ ID NO: 1157
  source 1..747: mol_type = other DNA

SEQ ID NO: 23739 - DNA, 747 bp, synthetic construct; identical to SEQ ID NO: 19302
  source 1..747: mol_type = other DNA

SEQ ID NO: 23740 - DNA, 726 bp, synthetic construct; identical to SEQ ID NO: 19976
  source 1..726: mol_type = other DNA

SEQ ID NO: 23741 - DNA, 746 bp, synthetic construct; identical to SEQ ID NO: 1141
  source 1..746: mol_type = other DNA

SEQ ID NO: 23742 - DNA, 729 bp, synthetic construct; identical to SEQ ID NO: 19500
  source 1..729: mol_type = other DNA

SEQ ID NO: 23743 - DNA, 733 bp, synthetic construct; identical to SEQ ID NO: 19400
  source 1..733: mol_type = other DNA

SEQ ID NO: 23744 - DNA, 858 bp, synthetic construct
  source 1..858: mol_type = other DNA
ctcaaacccgctgatcagcctcgactgtgccttctagttgccagccatctgttgtttgcccctcccccgtgccttccttgagaattcctcgacgtagatatcttaaaacagctctggggttgtacccaccccagaggcccacgtggcggctagtactccggtattgcggtacctttgtacgcctgttttatactcccttcccccgtaacttagaagcacaatgtccaagttcaataggagggggtgcaaaccagtaccaccacgaacaagcacttctgttcccccggtgaggctgtataggctgtttccacggctaaaagcggctgatccgttatccgctcatgtacttcgagaagcctagtatcaccttggaatcttcgatgcgttgcgctcaacactcaaccccagagtgtagcttaggtcgatgagtctggacgttcctcaccggcgacggtggtccaggctgcgttggcggcctacctgtggcccaaagccacaggacgctagttgtgaacaaggtgtgaagagcctattgagctacctgagagtcctccggcccctgaatgcggctaatcctaaccacggagcaggcagtggcaatccagcgaccagcctgtcgtaacgcgcaagttcgtggcggaaccgactactttgggtgtccgtgtttccttttatttttacaatggctgcttatggtgacaatcattgattgttatcataaagcaaattggattggccatccggtgagaatttgattattaaattactctcttgttgggattgctcctttgaaatcttgtgcactcacacctattggaattacctcattgttaagatacgcgtctagctagcgccacc

SEQ ID NO: 23745 - DNA, 749 bp, synthetic construct; identical to SEQ ID NO: 18026
  source 1..749: mol_type = other DNA

SEQ ID NO: 23746 - DNA, 747 bp, synthetic construct; identical to SEQ ID NO: 1158
  source 1..747: mol_type = other DNA

SEQ ID NO: 23747 - DNA, 745 bp, synthetic construct; identical to SEQ ID NO: 1093
  source 1..745: mol_type = other DNA

SEQ ID NO: 23748 - DNA, 735 bp, synthetic construct; identical to SEQ ID NO: 19353
  source 1..735: mol_type = other DNA

SEQ ID NO: 23749 - DNA, 701 bp, synthetic construct; identical to SEQ ID NO: 20185
  source 1..701: mol_type = other DNA

SEQ ID NO: 23750 - DNA, 752 bp, synthetic construct; identical to SEQ ID NO: 19131
  source 1..752: mol_type = other DNA

SEQ ID NO: 23751 - DNA, 722 bp, synthetic construct; identical to SEQ ID NO: 19981
  source 1..722: mol_type = other DNA

SEQ ID NO: 23752 - DNA, 726 bp, synthetic construct; identical to SEQ ID NO: 19800
  source 1..726: mol_type = other DNA

SEQ ID NO: 23753 - DNA, 725 bp, synthetic construct; identical to SEQ ID NO: 19980
  source 1..725: mol_type = other DNA

SEQ ID NO: 23754 - DNA, 747 bp, synthetic construct; identical to SEQ ID NO: 19356
  source 1..747: mol_type = other DNA

SEQ ID NO: 23755 - DNA, 727 bp, synthetic construct; identical to SEQ ID NO: 19792
  source 1..727: mol_type = other DNA

SEQ ID NO: 23756 - DNA, 745 bp, synthetic construct; identical to SEQ ID NO: 19106
  source 1..745: mol_type = other DNA

SEQ ID NO: 23757 - DNA, 749 bp, synthetic construct; identical to SEQ ID NO: 1191
  source 1..749: mol_type = other DNA

SEQ ID NO: 23758 - DNA, 754 bp, synthetic construct; identical to SEQ ID NO: 19128
  source 1..754: mol_type = other DNA

SEQ ID NO: 23759 - DNA, 747 bp, synthetic construct; identical to SEQ ID NO: 19285
  source 1..747: mol_type = other DNA

SEQ ID NO: 23760 - DNA, 715 bp, synthetic construct; identical to SEQ ID NO: 882
  source 1..715: mol_type = other DNA

SEQ ID NO: 23761 - DNA, 709 bp, synthetic construct
  source 1..709: mol_type = other DNA
aggcccacgtggcggccagtactctggtattacggtacctttgtacgcctgttttatatcccttcccccaatgtaacttagaagttcttaaacatagctcaatagacagtagtacacaccagtactgctacgagcaagcacttctgttaccccggtgaagttacatagactgtacccacggttgaaagcgactgatccgttatccgctttagtacttcgagaagcctagtaatatcttggaatcttcgatgcgttgcgctcaacactcaaccccagagtgtagcttaggtcgatgagtctggacattccccaccggcgacggtggtccaggctgcgttggcggcctacctgtgacccaaagtcacaggacgctagttgtgaacaaggtgtgaagagcctattgagctactaaagagtcctccggcccctgaatgcggctaatcccaaccacggagcaagtgctcacaacccagtgagtggcttgtcgtaacgagtaattctgtggcggaaccgactactttgggtgtccgtgtttcctttatttttatcattggctgcttatggtgacaatctaagattgccatcatatagcttttggattggccatccggtgatattttgagttattcaaattgctatttacagcattctttgtacactgttcattcatcactatttgcattttgttcttgaattttaaacagtcaaa

SEQ ID NO: 23762 - DNA, 721 bp, synthetic construct; identical to SEQ ID NO: 19962
  source 1..721: mol_type = other DNA

SEQ ID NO: 23763 - DNA, 742 bp, synthetic construct; identical to SEQ ID NO: 19791
  source 1..742: mol_type = other DNA

SEQ ID NO: 23764 - DNA, 742 bp, synthetic construct; identical to SEQ ID NO: 19114
  source 1..742: mol_type = other DNA

SEQ ID NO: 23765 - DNA, 743 bp, synthetic construct; identical to SEQ ID NO: 19632
  source 1..743: mol_type = other DNA

SEQ ID NO: 23766 - DNA, 720 bp, synthetic construct; identical to SEQ ID NO: 19956
  source 1..720: mol_type = other DNA

SEQ ID NO: 23767 - DNA, 743 bp, synthetic construct; identical to SEQ ID NO: 19426
  source 1..743: mol_type = other DNA

SEQ ID NO: 23768 - DNA, 744 bp, synthetic construct; identical to SEQ ID NO: 19759
  source 1..744: mol_type = other DNA

SEQ ID NO: 23769 - DNA, 743 bp, synthetic construct; identical to SEQ ID NO: 19626
  source 1..743: mol_type = other DNA

SEQ ID NO: 23770 - DNA, 738 bp, synthetic construct
  source 1..738: mol_type = other DNA
tccgatctgtgggttgttcccacccacagggcccactgggcgctagcacactggtattgcggtacctttgtgcgcctgttttatccaccctcccccactgtaacttagaagcttagcacagacggtcaatagacagcccaacacaccagttgggttttgaccaagcacttctgttaccccggaccgagtatcaataggctgctcgcgcggctgaaggagaaaacgttcgtcacccggccaattacttcgagaaacccagtaacaccatgaaagttgcgcagtgtttcgctccgcacaaccccagtgtagatcaggtcgatgagtcaccgcattccccacgggcgaccgtggcggtggctgcgctggcggcctgcccatggggtgacccatgggacgcttcaataccgacatggtgcgaagagtctattgagctaattggtagtcctccggcccctgaatgcggctaatcccaactgcggagcagatacccacatgccagtgggcagtctgtcgtaatgggtaactctgcagcggaaccgactactttgggtgtccgtgtttcctcttatacatattctggctgcttatggtgacaattgaaagattgttaccatatagctattggattggccatccggtgacaaacagagcgatcatattcctttttattggatttgtgccacttagctatagcagttacggtactctaatctacatccttcacttgaatacgagaaa

SEQ ID NO: 23771 - DNA, 742 bp, synthetic construct; identical to SEQ ID NO: 19730
  source 1..742: mol_type = other DNA

SEQ ID NO: 23772 - DNA, 742 bp, synthetic construct; identical to SEQ ID NO: 19512
  source 1..742: mol_type = other DNA

SEQ ID NO: 23773 - DNA, 720 bp, synthetic construct; identical to SEQ ID NO: 19984
  source 1..720: mol_type = other DNA

SEQ ID NO: 23774 - DNA, 742 bp, synthetic construct; identical to SEQ ID NO: 19784
  source 1..742: mol_type = other DNA

SEQ ID NO: 23775 - DNA, 743 bp, synthetic construct; identical to SEQ ID NO: 19582
  source 1..743: mol_type = other DNA

SEQ ID NO: 23776 - DNA, 742 bp, synthetic construct; identical to SEQ ID NO: 19401
  source 1..742: mol_type = other DNA

SEQ ID NO: 23777 - DNA, 742 bp, synthetic construct; identical to SEQ ID NO: 19522
  source 1..742: mol_type = other DNA

SEQ ID NO: 23778 - DNA, 744 bp, synthetic construct; identical to SEQ ID NO: 19649
  source 1..744: mol_type = other DNA

SEQ ID NO: 23779 - DNA, 744 bp, synthetic construct
  source 1..744: mol_type = other DNA
ttaaaacaggcctgtgggttgttcccacccacagggcccaccgggcgttagcacactggtatctcggtacctttgtgcgcctgttttatccacccttttcccatctaacttagaagcatgcgccaagacggtcaatagggagcccagtaaaccaattgggctatgaccaagcacttctgtaaccccgggccgagtatcaataagctgctcgcgcggctgaaggagaaaaagctcgttacccggccaattacttcgagaaacccagtagcatcatgaaagttgcgcagcgtttcgctccacacaaccccagtgtagatcaggctgatgagtcaccgcgttccccacgggcgaccgtggcggtggctgcgctggcggcctgcccatggggccacccatgggacgcttcaatactgacatggtgtgaagagtctattgagctaattggtagtcctccggcccctgaatgcggctaatcctaactgcggagcagatgcccacgcaccagtgggaagtctgtcgtaacgggtaactctgcagcggaaccgactactttgggtgtccgtgtttccttttatttctactctggctgcttatggtgacaattgaaaggttgttaccatatagctattggattggccatccggtgtcaaatagagcgattatttacttgtttgttgggtttgtaccattgaactacaaagttttaaacactcttaactatattttaatcctcaactcattaaa

SEQ ID NO: 23780 - DNA, 743 bp, synthetic construct
  source 1..743: mol_type = other DNA
ataaaacagcctgtgggttgtacccacccacagggcccactgggcgctagcactctggtattacggtacccttgtgcgcctgttttatcttcccttccctcagtgcaacttagaagtataatcttaatgatcagtaggtggctcagcatgccagctgggtcttgatcaagcacttctgttaccccggactgagtatcaataagctgctcgcgcggctgaaggagaaagcgttcgttacccggccaattacttcgagaaacctagtaccaccatggaagttgcgcggcgtttcgctccgcacaatcccagtgtagatcaggtcgatgagtcaccgcattccccacgggcgaccgtggcggtggctgcgttggcggcctgcccatggggcaacccatgggacgcttcaatactgacatggtgcgaagagtctattgagctaattggtagtcctccggcccctgaatgcggctaatcctaactgcggagcagatacccacaagccagtgggcgatctgtcgtaacgggcaactctgcagcggaaccgactactttgggtgtccgtgtttctttttattcctatactggctgcttatggtgacaattgagaaattgttaccatatagctattggattggccatccggtgactaacagagcaattgtatacctgtttgttggttttgtgccattgaacttcaaagttttaaaaacactcaatttaataattctacttaatacaacaag

SEQ ID NO: 23781 - DNA, 737 bp, synthetic construct
  source 1..737: mol_type = other DNA
gaagggtgggttgttcccacccacagggcccactgggcgttagcacactggtatctcggtacccttgtgcgcctgttttatatacccttccccctaaagtaaatcagaagttcgactataacggtcaataggaaacccagtgcaccaactgggtcacgaccaagcactcctgtaaccccggactgagtatcaataagctgctcgtgcggctgaaggagaaaacgttcgttacccggccaattacttcgagaaacctagtaccaccatgaaagttgcgcagcgtttcgctccgcacaaccccagtgtagatcaggtcgatgagccaccgcgttccccacgggtgaccgtggcggtggctgcgttggcggcctgcccatggggctacccatgggacgcttcaatactgacatggtgcgaagagtctattgagctaattggtagtcctccggcccctgaatgcggctaatcctaactgcggagcagatacccacacaccagtgggcggtctgtcgtaacgggcaactctgcagcggaaccgactactttgggtgtccgtgtttccttttattcttatactggctgcttatggtgacaattgagagattgttaccatatagctattggattggccatccggtgtctaacagagcaatcatttatctgtttgttggattcgtacccttgaatcttaaagtcctcaacactctcaacctcgtgctacaactaaactcggcaaa

SEQ ID NO: 23782 - DNA, 744 bp, synthetic construct
  source 1..744: mol_type = other DNA
ttataacagcctgtgggttgttcccacccacagggcccaccgggcgctagcacactggtatctcggtacctttgtgcgcctgttttatccacccttttcccatttaacttagaagcacgcaccaagacggtcaatagggagcccagtaaaccaattgggctatgaccaagcacttctgtaaccccgggccgagtatcaataagctgctcgcgcggctgaaggagaaaaagctcgttacccggccaattacttcgagaaacccagtagcatcatgaaagttgcgcagcgtttcgctccacacaaccccagtgtagatcaggccgatgagtcaccgcgttccccacgggtgaccgtggcggtggctgcgctggcggcctgcccatggggccacccatgggacgcttcaatattgacatggtgtgaagagtctattgagctaattggtagtcctccggcccctgaatgcggctaatcctaactgcggagcagatgcccacataccagtgggaagtctgtcgtaacgggtaactctgcagcggaaccgactactttgggtgtccgtgtttccttttatttctactctggctgcttatggtgacaattgaaaggttgttaccatatagctattggatcggccatccggtgtcaaatagagcgattatttacttgtttgttgggtttgtaccactgaactacaaagttttaaacactcttaactacatcttaatccttaactcatcaaaa

SEQ ID NO: 23783 - DNA, 729 bp, synthetic construct
  source 1..729: mol_type = other DNA
gtgggttgttcccacccacagggcccactgggcgctagcacactggtatcacggtacctttgtgcgcctgttttatccaccctcccccagagaaacttagaagcatgatctaaacggtcaatagaaaacctagcacaccagctgggacacgaccaagcactcctgtaaccccggaccgagtatcaataggctgctcacgtggctgaaggagaaaacgttcgttacccggccaattacttcgagaaacccagtaccaccatgaacgttgcgcagcgtttcgctccgcacaatcccagtgtagatcaggccgatgagtcaccgcattccccacgggcgaccgtggcggtggctgcgttggcggcctgcccatggggcaacccatgggacgctacaatactgacatggtgcgaagagtctattgagctaattggtagtcctccggcccctgaatgcggctaatcctaactgcggagcagatacccacacaccagtgggcagtctgtcgtaacgggtaactctgcagcggaaccgactactttgggtgtccgtgtttccttttatcttttactggctgcttatggtgacaattgagagattgttaccatatagctattggattagccatccggtgtctaatagagcaattatttatctgttcgttggattcgtacctttgaactacaaagtttttaaaactctcaacctcgtcttacgattcaactctgcaaa

SEQ ID NO: 23784 - DNA, 743 bp, synthetic construct; identical to SEQ ID NO: 19479
  source 1..743: mol_type = other DNA

SEQ ID NO: 23785 - DNA, 743 bp, synthetic construct; identical to SEQ ID NO: 19709
  source 1..743: mol_type = other DNA

SEQ ID NO: 23786 - DNA, 742 bp, synthetic construct; identical to SEQ ID NO: 1013
  source 1..742: mol_type = other DNA

SEQ ID NO: 23787 - DNA, 743 bp, synthetic construct; identical to SEQ ID NO: 19560
  source 1..743: mol_type = other DNA

SEQ ID NO: 23788 - DNA, 742 bp, synthetic construct; identical to SEQ ID NO: 19802
  source 1..742: mol_type = other DNA

SEQ ID NO: 23789 - DNA, 744 bp, synthetic construct; identical to SEQ ID NO: 19589
  source 1..744: mol_type = other DNA

SEQ ID NO: 23790 - DNA, 743 bp, synthetic construct; identical to SEQ ID NO: 19432
  source 1..743: mol_type = other DNA

SEQ ID NO: 23791 - DNA, 741 bp, synthetic construct; identical to SEQ ID NO: 19450
  source 1..741: mol_type = other DNA

SEQ ID NO: 23792 - DNA, 739 bp, synthetic construct
  source 1..739: mol_type = other DNA
ttaaaacagcctgtgggttgttcccacccacagggcccactgggcgtcagcacactggtattgcggtacccttgtgcgcctgttttatctacccctccccaatgtaacttagaagcatgctacacacggtcaatagacggttcagtacgccaactgaatcacgaccaagcacttctgttgccccggactgagtatcaataggctgctcgcgcggctgaaggagaaaacgttcgttacccggccaattacttcgagaaacccagtaccaccatggaggttgcgccagtttcgctccgcacaaccccagtgtagatcaggtcgatgagtcaccgcaatcccacaggcgactgtggcggtggctgcgttggcggcctgccatgagcgcagctcatgggacgcttcaatactgacatggtgcgaagagtccattgagctaattggtagtctccggcccctgaatgcggctaatcccaactgcggagcagacacccacaagccagtgggcagtctgtcgtaacgggtaactctgcagcggaaccgactactttgggtgtccgtgtttccttttattcttatactggctgcttatggtgacaattgagagattgttaccatatagctattggattggccacccggtgtctaacagagcgattatttacctctttgttggatacataccactaaatcacaaagttttaaagactctcaactttatattaatacttaactcagcaag

SEQ ID NO: 23793 - DNA, 741 bp, synthetic construct; identical to SEQ ID NO: 19528
  source 1..741: mol_type = other DNA

SEQ ID NO: 23794 - DNA, 743 bp, synthetic construct; identical to SEQ ID NO: 19652
  source 1..743: mol_type = other DNA

SEQ ID NO: 23795 - DNA, 742 bp, synthetic construct; identical to SEQ ID NO: 19397
  source 1..742: mol_type = other DNA

SEQ ID NO: 23796 - DNA, 720 bp, synthetic construct; identical to SEQ ID NO: 19870
  source 1..720: mol_type = other DNA

SEQ ID NO: 23797 - DNA, 750 bp, synthetic construct; identical to SEQ ID NO: 19093
  source 1..750: mol_type = other DNA

SEQ ID NO: 23798 - DNA, 744 bp, synthetic construct; identical to SEQ ID NO: 18000
  source 1..744: mol_type = other DNA

SEQ ID NO: 23799 - DNA, 714 bp, synthetic construct; identical to SEQ ID NO: 879
  source 1..714: mol_type = other DNA

SEQ ID NO: 23800 - DNA, 732 bp, synthetic construct
  source 1..732: mol_type = other DNA
ttaaagctcgagggttgttcccaccctagaggcccacgtggcggccagtactctggtattacggtacctttgtacgcctgttttatatcccttcccccaatgtaacttagaagttcttaaacatagctcaatagacagtagtacgcaccagtactgctacgagcaagcacttctgttaccccggtgaagttacatagactgtacccacggttgaaagtgactgatccgttatccgctttagtacttcgagaagcccagtaataccttggaatcttcgatgcgttgcgctcaacactcaaccccagagtgtagcttaggtcgatgagtctggacattccccaccggcgacggtggtccaggctgcgttggcggcctacctgtggcccaaagccacaggacgctagttgtgaacaaggtgtgaagagcctattgagctactaaagagtcctccggcccctgaatgcggctaatcccaaccacggagcaagtgctcacaacccagtgagtggcttgtcgtaacgagtaattctgtggcggaaccgactactttgggtgtccgtgtttcctttattctttatcattggctgcttatggtgacaatctaagattgttatcatatagcttttggattggccatccggtgatattttgagtcgttcaaattgctattttgtgcactgctcattcataaccatttacatcttgttcttgagttgcttctaaacaatcaaa

SEQ ID NO: 23801 - DNA, 746 bp, synthetic construct; identical to SEQ ID NO: 19130
  source 1..746: mol_type = other DNA

SEQ ID NO: 23802 - DNA, 709 bp, synthetic construct
  source 1..709: mol_type = other DNA
ttaaaacaagcccttgggtgttcccaccccagaggcccacgtggcggctagtactctggtatcacggtacctttgtacgcctgttttacatcccctccccaagtaactttagaagcgagtcataaagttcaacagaagggggtgcaaaccagcaccaccacgaacaagcacttctgtttccccggtgaagctgtatagactgtccccacggttgaaaatggcagatccgttatccgctcacgtacttcgagaagcctagtatcaccttggaatcttcgatgcgttgcgctcagcactctaccccgagtgtagcttaggtcgatgagtctgggcataccccaccggcgacggtggcccaggctgcgttggcggcctacccatggttaacaccatgggacgctagttgtgaacaaggtgtgaagagcctattgagctacctgagagtcctccggcccctgaatgcggctaatcccaaccacggagcaagtgcccacaaaccagtgggtaacttgtcgtaacgcgcaagtctgtggcggaaccgactactttgggtgtccgtgtttccttttattttttatcatggctgcttatggtgacaatctaagattgttatcatatagctattggactggccatccggtaattttgaaagtgatattggccttgttatttcattgcatctgtttattcacaatactgcaaactcaca

SEQ ID NO: 23803 - DNA, 715 bp, synthetic construct; identical to SEQ ID NO: 883
  source 1..715: mol_type = other DNA

SEQ ID NO: 23804 - DNA, 714 bp, synthetic construct
  source 1..714: mol_type = other DNA
ttttttaaaacagctctggggttgttcccaccccagaggcccacgtggcggctagtactctggtattaaggtacctttgtacgcctgttttatctcccctcccccaagtaactttagaagtaattcaaacagttcaatagagggggtacaaaccagtaccaccacgaacaagcacttctgtttccccggtgaagctgtatagactgtacccacggtcgaaaacggtagatccgttatccgctcaagtacttcgagaagcctagtattaccttggaatcttcgatgcgttgcactcagcactctacccccgagtgtagcttaggtcgatgagtctgggcataccccaccggtaacggtggcccaggctgcgttggcggcctacccatggctaacgccatgggacgctagttgtgaacaaggtgtgaagagcctattgagctacttgagagtcctccggcccctgaatgcggctaatcccaaccacggagcaagtgcctgcatgccagcaggtagcttgtcgtaacgcgtaagtctgtggcgggaccgactactttgggtgtccgtgtttccttttattcttattatggctgcttatggtgacaatctaagattgttatcatatagcttttggattggccatccggtaattattcgactttcaaacgctcgtttatcttatttcatcacacatccgtttgattaattgactataca

SEQ ID NO: 23805 - DNA, 812 bp, synthetic construct; identical to SEQ ID NO: 19068
  source 1..812: mol_type = other DNA

SEQ ID NO: 23806 - DNA, 722 bp, synthetic construct; identical to SEQ ID NO: 20008
  source 1..722: mol_type = other DNA

SEQ ID NO: 23807 - DNA, 797 bp, synthetic construct; identical to SEQ ID NO: 19066
  source 1..797: mol_type = other DNA

SEQ ID NO: 23808 - DNA, 813 bp, synthetic construct; identical to SEQ ID NO: 19041
  source 1..813: mol_type = other DNA

SEQ ID NO: 23809 - DNA, 811 bp, synthetic construct; identical to SEQ ID NO: 19067
  source 1..811: mol_type = other DNA

SEQ ID NO: 23810 - DNA, 813 bp, synthetic construct; identical to SEQ ID NO: 19045
  source 1..813: mol_type = other DNA

SEQ ID NO: 23811 - DNA, 790 bp, synthetic construct; identical to SEQ ID NO: 19069
  source 1..790: mol_type = other DNA

SEQ ID NO: 23812 - DNA, 798 bp, synthetic construct; identical to SEQ ID NO: 19974
  source 1..798: mol_type = other DNA

SEQ ID NO: 23813 - DNA, 813 bp, synthetic construct; identical to SEQ ID NO: 19046
  source 1..813: mol_type = other DNA

SEQ ID NO: 23814 - DNA, 802 bp, synthetic construct; identical to SEQ ID NO: 20032
  source 1..802: mol_type = other DNA

SEQ ID NO: 23815 - DNA, 811 bp, synthetic construct; identical to SEQ ID NO: 19061
  source 1..811: mol_type = other DNA

SEQ ID NO: 23816 - DNA, 805 bp, synthetic construct; identical to SEQ ID NO: 19048
  source 1..805: mol_type = other DNA

SEQ ID NO: 23817 - DNA, 811 bp, synthetic construct; identical to SEQ ID NO: 1251
  source 1..811: mol_type = other DNA

SEQ ID NO: 23818 - DNA, 801 bp, synthetic construct; identical to SEQ ID NO: 19964
  source 1..801: mol_type = other DNA

SEQ ID NO: 23819 - DNA, 815 bp, synthetic construct; identical to SEQ ID NO: 19044
  source 1..815: mol_type = other DNA

SEQ ID NO: 23820 - DNA, 789 bp, synthetic construct; identical to SEQ ID NO: 19968
  source 1..789: mol_type = other DNA

SEQ ID NO: 23821 - DNA, 787 bp, synthetic construct; identical to SEQ ID NO: 20052
  source 1..787: mol_type = other DNA

SEQ ID NO: 23822 - DNA, 769 bp, synthetic construct; identical to SEQ ID NO: 20061
  source 1..769: mol_type = other DNA

SEQ ID NO: 23823 - DNA, 813 bp, synthetic construct; identical to SEQ ID NO: 19052
  source 1..813: mol_type = other DNA

SEQ ID NO: 23824 - DNA, 811 bp, synthetic construct; identical to SEQ ID NO: 19780
  source 1..811: mol_type = other DNA

SEQ ID NO: 23825 - DNA, 811 bp, synthetic construct
  source 1..811: mol_type = other DNA
ttaaaacagcctgtgggttgttcccacccacagggcccactgggcgctagtacactggtatgccttacctcggtattacggtaccggtgtatatagtacccttgtacgcctgttttatatcccttcccccaaacgtaactttagaagtttaaaataatgacgaccaataggagtccaacatccagttggattgcggtcaagcacttctgtctccccggacctagtagtgataggctgtacccacggccgaagatgaacccgtccgttatccggccagctacttcgagaagcctagtaacatcaaagatctgtcttggcgtttcgctcagcgcgttccccccgtgtagatcgggctgatgggtctccgcataccccacgggcgaccgtggcggaggccgcgtggcggcccgcctatggcgaaagccataggacgccatttcagtgacagggtgtgaagagcctattgagctagttggtagtcctccggcccctgaatgcggctaatcctaaccacggagcgtccaccagcaaaccagctgacagggcgtcgtaacgggtaactctgtggcggaaccgactactttgggtgtccgtgtttccttttgatcctattttggctgcttatggtgacaacgataagttgttatcataaagcttttgggttggccacctggaaaaggttatcagtgtttgatattgttcggctttcacgcctaccaataaaacaagccttgtatttccctatttcattttatccggcaaaagatattacggaatttcatctgaaccttttgctctcattatcaacaag

SEQ ID NO: 23826 - DNA, 808 bp, synthetic construct; identical to SEQ ID NO: 19933
  source 1..808: mol_type = other DNA

SEQ ID NO: 23827 - DNA, 795 bp, synthetic construct; identical to SEQ ID NO: 19959
  source 1..795: mol_type = other DNA

SEQ ID NO: 23828 - DNA, 784 bp, synthetic construct; identical to SEQ ID NO: 20375
  source 1..784: mol_type = other DNA

SEQ ID NO: 23829 - DNA, 802 bp, synthetic construct; identical to SEQ ID NO: 19925
  source 1..802: mol_type = other DNA

SEQ ID NO: 23830 - DNA, 802 bp, synthetic construct
  source 1..802: mol_type = other DNA
acagtctatgggttgttcccaccctagagcccactgggcgctagtacactggtacgccagtaccttggtatcacggtatcattgtacgtcagtacctttgtatgcctgttttatgccccttcccccaatgtaactttagaagcttacaaaacaaagaccactaggagtccaacacccagttggattgcggtcaagcacttctgtttccccggacctagtagtgataggctgtacccacggccgaagatgaacccgtccgttatccggccagctacttcgagaagcctagtagcatcaaagatctgtcttggcgtttcgctcagcgcgttccccccgcgtagatcgggctgatgggtctccgcatcccccacgggcgaccgtggcggaggccgcgtggcggcccgcctatggcgaaagccataggacgccatttcagtgacagggtgtgaagagcctattgagctagttggtagtcctccggcccctgaatgcggctaatcctaaccacggagcgtccaccagcaaaccagctggcagggcgtcgtaacgggtaactcggtggcggaaccgactactttgggtgtccgtgtttccttttgatcctatttggctgcttatggtgacaacgataagttgttatcataaagcttttgggttggccacctggaaaaagttatcagtgtttgatattgttcggctttcacgcctaccaataaaacaagccctttacttgttagttgctttttatcccacaaaggatattactgagtttcacttacaactcttgctaacattgtcaaca

SEQ ID NO: 23831 - DNA, 792 bp, synthetic construct; identical to SEQ ID NO: 19992
  source 1..792: mol_type = other DNA

SEQ ID NO: 23832 - DNA, 801 bp, synthetic construct; identical to SEQ ID NO: 19053
  source 1..801: mol_type = other DNA

SEQ ID NO: 23833 - DNA, 813 bp, synthetic construct; identical to SEQ ID NO: 19732
  source 1..813: mol_type = other DNA

SEQ ID NO: 23834 - DNA, 811 bp, synthetic construct; identical to SEQ ID NO: 19750
  source 1..811: mol_type = other DNA

SEQ ID NO: 23835 - DNA, 795 bp, synthetic construct; identical to SEQ ID NO: 19983
  source 1..795: mol_type = other DNA

SEQ ID NO: 23836 - DNA, 813 bp, synthetic construct; identical to SEQ ID NO: 19043
  source 1..813: mol_type = other DNA

SEQ ID NO: 23837 - DNA, 716 bp, synthetic construct; identical to SEQ ID NO: 20686
  source 1..716: mol_type = other DNA

SEQ ID NO: 23838 - DNA, 803 bp, synthetic construct
  source 1..803: mol_type = other DNA
acagtccgtgggttgttcccatccacagagcctactgggcgctagtacaccggtacgccagtaccttggtatcacggtaccatcgtacgccagtacccttgtacgcctgttttataccccttcccatgcaactttagaagtttaaataaacaaagaccaataggagtccaacaaccagttggattgcggtcaagcacttctgtctccccggacctagtagtgataggctgtacccacggccgaagatgaacccgtccgttacccggccagctacttcgagaagcctagtagcatcaaagatctgtcttggcgtttcgctcagcgcgttcccccccgcgtagatcgggctgatgggtctccgcatcccccacgggcgaccgtggcggaggccgcgtggcggcccgcctatggcgaaagccataggacgccatttcagtgacagggtgtgaagagcctattgagctagttggtagtcctccggcccctgaatgcggctaatcctaaccacggagcgtccaccagcaaaccagctggcagggcgtcgtaacgggtaactctgtggcggaaccgactactttgggtgtccgtgtttccttttgatcctatattggctgcttatggtgacaacgataagttgttatcataaagcttttgggttggccacctggaaaaagttatcagtgtttgatattgttcggctttcacgcctaccaataaaacaagctttatacttacttgttgctttttatcctacaaaggatatcacagagtttcatttacaacttttgctaacgttgtcagca

SEQ ID NO: 23839 - DNA, 705 bp, synthetic construct; identical to SEQ ID NO: 20700
  source 1..705: mol_type = other DNA

SEQ ID NO: 23840 - DNA, 805 bp, synthetic construct; identical to SEQ ID NO: 19065
  source 1..805: mol_type = other DNA

SEQ ID NO: 23841 - DNA, 713 bp, synthetic construct; identical to SEQ ID NO: 19070
  source 1..713: mol_type = other DNA

SEQ ID NO: 23842 - DNA, 803 bp, synthetic construct; identical to SEQ ID NO: 19866
  source 1..803: mol_type = other DNA

SEQ ID NO: 23843 - DNA, 830 bp, synthetic construct
  source 1..830: mol_type = other DNA
atagcctatggggcgctcccacccaagggcccaacgggcgccagtacactggtacgccagtaccctggtattacggtaccattgtacgccagtacctttgtacgcctatttgtacccctcccccatgtaaccttagaagcttaaatatacaatgaccaataggagtccaacacccagttggattgcggtcaagcacttctgtctccccggacctagtagtgataggctgtacccacggccgaagatgaacccgtccgttatccggccagctacttcgagaagcctagtagcatcaaagatctgtcttggcgtttcgctcagcgcattccccccgcgtagatcgggctgatgggtctccgcattccccacgggcgaccgtggcggaggccgcgtggcggcccgcctatggcgaaagccataggacgccatttcagtgacagggtgtgaagagcctattgagctagttggtagtcctccggcccctgaatgcggctaatcctaaccactgagcgtccaccaacaaaccagttgggagggcgtcgtaacgggtaactcggtggcggaaccgactactttgggtgtccgtgtttcctgttgatcctatattggctgcttatggtgacaacgataagttgttatcataaagcttttgggttggccacctggaaaaaattatcagtgtttgatattgttcggctttcacgcctaccaataaaacaagctctttatttgttagttggattttaccctacaagggacattactgagttccatttacaactcttgctcacgctatcagcaagatacctgccctgattaaattgttaaac

SEQ ID NO: 23844 - DNA, 720 bp, synthetic construct; identical to SEQ ID NO: 20651
  source 1..720: mol_type = other DNA

SEQ ID NO: 23845 - DNA, 707 bp, synthetic construct; identical to SEQ ID NO: 20699
  source 1..707: mol_type = other DNA

SEQ ID NO: 23846 - DNA, 842 bp, synthetic construct; identical to SEQ ID NO: 19042
  source 1..842: mol_type = other DNA

SEQ ID NO: 23847 - DNA, 811 bp, synthetic construct; identical to SEQ ID NO: 19796
  source 1..811: mol_type = other DNA

SEQ ID NO: 23848 - DNA, 812 bp, synthetic construct; identical to SEQ ID NO: 19746
  source 1..812: mol_type = other DNA

SEQ ID NO: 23849 - DNA, 802 bp, synthetic construct
  source 1..802: mol_type = other DNA
atagcctatggggcgctcccacccaagggccaatctggcgctagtacactggtacgccagtaccttggtatcacggtaccactgtacgttagtacctttgtatgcctatttgcatcccttcccaaagtaactttagaaacttaaaatacaaagaccaataggagtccaacacccagttggattgcggtcaagcacttctgtttccccggacctagtagtgataggctgtacccacggccgaagatgaacccgtccgttatccggccagctacttcgagaagcctagtagcatcaaagatctgtcttggcgtttcgctcagcgcgttccccccgcgtagatcgggtcgatgggtctccgcatcccccacgggcgaccgtggcggaggccgcgtggcggcccgcctatggcgaaagccataggacgccatttcagtgacagggtgtgaagagcctattgagctagttggtagtcctccggcccctgaatgcggctaatcctaaccacggagcgtccaccagcaaaccagctggcagggcgtcgtaacgggtaactctgtggcggaaccgactactttgggtgtccgtgtttccttttgatcctatgttggctgcttatggtgacaacgataagttgttatcataaagctcttgggttggccacctggaaaaagttatcagtgtttgatattgttcggcttgcacgcctaccaattaaacaagctctatacttgttagtttcattttattcatttgagggtattactcagtttcatctacaacttttgctcacactatcagcaaa

SEQ ID NO: 23850 - DNA, 801 bp, synthetic construct; identical to SEQ ID NO: 19912
  source 1..801: mol_type = other DNA

SEQ ID NO: 23851 - DNA, 800 bp, synthetic construct; identical to SEQ ID NO: 19990
  source 1..800: mol_type = other DNA

SEQ ID NO: 23852 - DNA, 652 bp, synthetic construct; identical to SEQ ID NO: 20694
  source 1..652: mol_type = other DNA

SEQ ID NO: 23853 - DNA, 801 bp, synthetic construct; identical to SEQ ID NO: 20000
  source 1..801: mol_type = other DNA

SEQ ID NO: 23854 - DNA, 796 bp, synthetic construct; identical to SEQ ID NO: 19058
  source 1..796: mol_type = other DNA

SEQ ID NO: 23855 - DNA, 809 bp, synthetic construct; identical to SEQ ID NO: 19788
  source 1..809: mol_type = other DNA

SEQ ID NO: 23856 - DNA, 745 bp, synthetic construct; identical to SEQ ID NO: 19110
  source 1..745: mol_type = other DNA

SEQ ID NO: 23857 - DNA, 825 bp, synthetic construct
  source 1..825: mol_type = other DNA
tttaaaaccagcctgggggttgtacccacccctggggcccacgtggcgccagtactctggtacgctagtacctttgtacgcctgttttcccctcccttaaataaattaagattgccactactgaggggagtagtccgactccgctccggcactgccgcaccagtacaccggtacgctagtacccttgtacggagtagatggtgtccccaccccgaaacttagaagcaagcaaacaaaccgaccaataggcgcgcggcacccagtcgcgtaacggtcaagcacttctgtttccccggtccgcaaggatcgttacccgcccgacccactacgagaagcctagtaactggccaagtgattgcgaggttgcgctcagccacaaccccagtggtagctctggaagatggggctcgcatattcccccgtggtaacacggttgcctgcccgcgtgtgcttccgggttcggccctctgccgttcacctcaatttcatgtaaccagccaagagcctattgtgctgggacggttttcctccggggccgtgaatgctgctaatcccaacctccgagcgtgtgcgcacaaaccagtgttgctacgtcgtaacgcgtaagttggaggcggaacagactactttcggtaccccgtgtttcctttatattttatttactatttttatggtgacaattgctgagatttgcgatctagccgctctgccgttgaatattgcattgtactaccttattgcattccataaaacctcagatattcccagctcttacattgacttgcttgttttcctcaatttaaaatatagattagaaactacaag

SEQ ID NO: 23858 - DNA, 822 bp, synthetic construct
  source 1..822: mol_type = other DNA
tttaaaagagcctgggggttgtacccacccctggggcccacgtggcgctagtactctggtacgttagtacctttgtacgcctgttttcccctcccttaaataaattaagattaccactactgaggggagtagtccgactccgctccggcaacgccgcaccagtacaccggtatgctagtacccttgtacggagtagatggtatccccaccctgaaacttagaagcaagcaaacacaccgaccaataggcgcgcggcatccagtcgcgcaacggtcaagcacctctgtttccccggtccgcaaggatcgttacccgcccgacccactacgagaagcctagtagctggccaaatgattgcgaggttgcgctcagccacaaccccagtggtagctctggaagatggggctcgcacatcccccgtggtaacacggttgcctgcccgcgtgtgcttccgggttcggccttgtgccgttcacctcagtttcatgtaaccagccaagagcctattgtgctgggacggttctcctccggggccgtgaatgctgctaatcccaacctccgagcgtgtgcgcacaaaccagtgttgctacgtcgtaacgcgtaagttggaggcggaacagactactttcggtaccccgtgtttcctttatattttacttattattttatggtgacaattgctgagatttgcgatttagcgactctgcctttgaatattgcactgtattatcttattgcattccataaaacctcaaatattcccagttcctatattgatttattggtttttctcaatttgaaatatagattggataatacgag

SEQ ID NO: 23859 - DNA, 822 bp, synthetic construct; identical to SEQ ID NO: 1277
  source 1..822: mol_type = other DNA

SEQ ID NO: 23860 - DNA, 817 bp, synthetic construct; identical to SEQ ID NO: 1262
  source 1..817: mol_type = other DNA

SEQ ID NO: 23861 - DNA, 822 bp, synthetic construct; identical to SEQ ID NO: 19529
  source 1..822: mol_type = other DNA

SEQ ID NO: 23862 - DNA, 816 bp, synthetic construct; identical to SEQ ID NO: 21509
  source 1..816: mol_type = other DNA

SEQ ID NO: 23863 - DNA, 822 bp, synthetic construct
  source 1..822: mol_type = other DNA
tttaaaagagtcagggggttgtacccacccctggggcccacgtggcgccagtacactggtgtgctagcacctttgtacgcctgtttttccctcccttaaataaatcaagatcaccactactgaggggagtagtccgactccgctccagcaatgctgcaccagtgcactggtacgctagtaccttttcacggagtagatggtgtccccaccccggaacttagaagctttgaaaccaaccgtccaataggcgcgcggtatccagccgtgtaacggacaagcacttctgtctccccggtccgcaaggatcgttacccgcccgacccactgcgagaagcctactaactggccaagtgaccacgaagttgcgctcagccacaaccccagtggtagctctggaagatggggctcgcaatccccccgtggtgacacggttgcctgcccgcgtgtgcttccgggttcggccttgtgccgttcacttcaacgtcacgcaaccagcgaagagcctattgcgctgggacggtactcctccggggccgtgaatgctgctaatcctaacctccgagcgtgtgcgcacaatccagtgttgctacgtcgtaacgcgtaagtcggaggcggaacagactactttcggtaccccgtgtttcctttgttttatacccactgatttatggtgacaattgttgagatttgtgatttggcgaaattaccgttgaatattgccttgtactatctggtttcttttcacaaagcctctagtatccctagctcttacatcgacctgcttgtttttctcaatttaaagtataaattggagaacgcaag

SEQ ID NO: 23864 - DNA, 798 bp, synthetic construct
  source 1..798: mol_type = other DNA
tcccactcccggggcccacgtggcgctagtactctggtacgttagtacctttgtacgcctgttttcccctccttaaataaattaagattaccactactgaggggagtagtccgactccgctccagcactgctgcaccagtgaattggtatgattagtacctcttcacggagtagatggtattcctaccccgcaacttagaagtttatcaacaaaccgaccaataggtgcacagtatccagctgtgtaacggtcaagcacttctgtttccccggtccgccaggatcgttacccgcccgacccactacgagaagcctagtaactagccaagtgaccgcgaagttgcgctcagccacaacccctgtggtagctctggaagatggggctcgcacttcccccgtggtaacacggttgcctgcccgcgtgtgcttctgggttcggccttgtgccgttcacttctacgtcatgtaactagccaagagcctattgtgctgggacggttttcctccggggccgtgaatgctgctaatcctaacctccgagcgtgtgcgcacaatccagtgttgctacgtcgtaacgcgtaagttggaggcggaacagactactttcggtaccccgtgtttccttttattactatattatttaatggtgacaattgcagaaatttgtgatttagcgactttgccattggacatagcattatattgtttaattgcttttcacaaaacgtctgatatacccaactcttatattgatctacttgtctttctttgcttgaagaataaattagagaaagcacg

SEQ ID NO: 23865 - DNA, 539 bp, synthetic construct
  source 1..539: mol_type = other DNA
tttaaaacagcctgggggttgttcccacccctggggcccacgtggcgctagtactctggtacgtcagtacccttgtacgcctgtttttcccccccttaaataaattaagattaccactactgaggggagtagtccgactccgctccagcactgctgcaccagtgaattggtacgttagtacctctgcacggagtagatggtatccccaccccgtaacctagaagcaaagtacacaaccgaccaatagcggcactgcatccagctgtgcaacggtcaagcacttctgtttccccggtccgcaaggatcgttacccgcccaggccactacgagaagcctactaactactgaagcagtcaagaggttgcgctcagccacaatcccagtggtagctctgagtgatggggctcgcgtctcccccgtggtaacacggtcgcttgcccgcgcgtgcactcgggtccggccttcggccgttcacctcgaagctgtgtaagtagccaagagcctattgtgctggtttggttttcctccggagccgtga

SEQ ID NO: 23866 - DNA, 822 bp, synthetic construct; identical to SEQ ID NO: 1281
  source 1..822: mol_type = other DNA

SEQ ID NO: 23867 - DNA, 540 bp, synthetic construct
  source 1..540: mol_type = other DNA
tttaaaacagcctgggggttgttcccacccctggggcccacgcggcgccagtactctggtacgccagtacctttgtacgcctgtttttccctcccttaaataaattaagattaccactactgaggggagtagtccgactccgctccagcactgctgcaccagtgaattggtacgctagtacctctgcacggagtagatggtatccccaccccgcaacttagaagcaaagtacaaacccgaccaatagcggcactgcatccagctgtgcaacggtcaagcacttctgtttccccggtccgcaaggatcgttacccgcccagaccactatgagaagcctattaactactgaaacggcctagaggttgcgctcagccacaaccccagtggtagctctgagtgatggggctcgcaaactcccccgtggtgacacggttgcttgcccgcgtgtgcactcgggttcgacccttcgtcgttcacctcgaagccgcgtaggtagccaagagcctattgtgctggtttggttttcctccggagccgtga

SEQ ID NO: 23868 - DNA, 539 bp, synthetic construct
  source 1..539: mol_type = other DNA
tttaaaacagcctgggggttgttcccacccctggggcccacgcggcgccagtactctggtacgctagtacctttgtacgcctgttttccccctcccttaaataaattaagattgccactactgaggggagtagtccgactccgctccagcactgctgcaccagtggattggtacgctagtacctctacacggagtagatggtatccctgcccagtaacttagaagcaaagcacaaaaccgaccaatagcggcactgcatccagctgtgcgacggtcaagcacttctgtttccccggtccgcaaggatcgttacccgcccggaccaccacgagaagcctattaactactgaaacggcctagaggttgcattcagccacaaccccagtggtagctctgagtgatggggctcgcagttcccccgtggtaacacggttgcttgcccgcgcgtgcactcgggttcggccctaggccgttcacctcgaaaccgcgtaagtagccaagagcctattgtgctggcccggtttcctccggagccgtga

SEQ ID NO: 23869 - DNA, 632 bp, synthetic construct
  source 1..632: mol_type = other DNA
cggagtagatggtatccccaccccgaaacttagaagcaagcaacaaaccgaccaataggcgcgcggcatccagttgcgtatcggtcaagcacttctgtttccccggtccgcaaggatcgttacccgcccgacccactacgagaagcctagtaactggccaagtgaatgcgaggttgcgctcagccacaaccccagtggtagctctggaagatggggctcgcacatcccccgtggtaacacggttgcttgcccgcgcgcgcttccgggttcggccctgtgccgttcacctcaatctcacgtaaccagccaagagcctattgtgctgggacggttctcctccggggccgtgaatgctgctaatcccaacctccgagcgtgtgcgcacaaaccagtgttgctacgtcgtaacgcgtaagttggaggcggaacagactactttcggtaccccgtgtttcctttatttttactcattattttatggtgacaattgctgagatcagtggtttagcgactctaccgttgaacattgcactatattacctcattgcattccatagagcttctgatatccctagttcctatattgatttgcttgtttttcttaacctgaaatataaacttgagagtataaa

SEQ ID NO: 23870 - DNA, 821 bp, synthetic construct
  source 1..821: mol_type = other DNA
tttaaaaccacctgggggttgtacccacccctggggcccacgtggcgccagtactctggttcgtttagaacctttgtacgcctgttttcccctcccttaaacaaattaagattgccactactgaggggagtagtccgactccgctccaacactgttgcaccagtagaccggtatgcgtagtacccttctacggagtagatggcagccccaccccgtaacttagaagtatgaaacaaaatggccaataggggcgcggcagccagtcgcgcagcggtcaagcacttctgtttccccggtcagaaatgatcgttacccgccctacccactacgagaagcctattaactgctgaaagtggcgaagagttgcgctcagccgcaaacccagcggtagctctgagagatggggctcgcattctcccccgtggtgacacggttgcttgcccgcgagtgctctcgggttcgattttcggatcgttcactctaaaccaccgtatgcagccaagagcctattgtgctgggaaggttatcctccggagccgtgaatgctgctaatcccaacctccgagcgtgtgtgcacaaaccagtgttactacgtcgtaacgcgtaagttggaggcggaacagactactttcggtactccgtgtttccttatttttattcatttcaatttatggtgacattgactgatataattgagttagcacgcctaccattgaatattgcactgtattatttgattgcatttaataagagtacagaactcacccttgaattcattgattttgtggttttcctaaactcaattcacaaatctatcaaaa

SEQ ID NO: 23871 - DNA, 821 bp, synthetic construct; identical to SEQ ID NO: 1274
  source 1..821: mol_type = other DNA

SEQ ID NO: 23872 - DNA, 813 bp, synthetic construct
  source 1..813: mol_type = other DNA
tttaaaacagcctgggggttgtacccacccctggggcccacgcggcgctagtactctggttcgcttagaacctttgtacgcctgtttttccctcccttaaataaattaagatctctaccaatgtggggagtagtccgactccgcaccgatacgtcgcaccagcagaccggttcgcttaggacccttctgcggattggtatgagcacccaccccgtaacttagaagcactgaaccaaccgaccaataggtgcgtggcatccagccatgttaaggtcaagcacttctgtttccccggtcagaaatgatcgttatccgccctacccactacgagaagcctactaactactgaaagtgaggaggagttgcgttccgccatgaccccgatggtagctctgagggatggagctcgcagttcccccgtggtaacacggttgcttgctcgcgcgtgccctcgggttcgaccccacggtcgttcactccaagtcaccgtaagtagccaagagcctattgtgctgggaaggttttcctccggagccgtgaatgctgctaatcctaacctccgagcgtgtgcgcacaatccagtgttgctacgtcgtaacgcgtaagttggaggcggaacagactactttcggtactccgtgtttcctttattttattcattcatttatggtgacattatctgagatttgtgaaattgcgaaattgccattgaacattgcactatattacctaatatcattttacaaaacatcagaattaacagttgaactcattgactttcttgttttccttaataagaacaaactcaagaca

SEQ ID NO: 23873 - DNA, 811 bp, synthetic construct; identical to SEQ ID NO: 19909
  source 1..811: mol_type = other DNA

SEQ ID NO: 23874 - DNA, 820 bp, synthetic construct; identical to SEQ ID NO: 19569
  source 1..820: mol_type = other DNA

SEQ ID NO: 23875 - DNA, 820 bp, synthetic construct
  source 1..820: mol_type = other DNA
tttaaaacagcctgggggttgttcccacccccggggcccacgtggcgctagtgctctggttcgtttagaacctttgcacgcctgttttccccccctaaacaaattaagcttgccggtgctgaggggagtagtccgactccgctccactacggtgcaccagtagactggtatcgcggtacctttctacggagttaccggtatccccccacccgtaacttagaagtttgaacacaaatcgaccaatagcggttcggcaaccagtcgggcaacggtcaagcacttctgtttccccggtccgtaaggatcgttacccgccccaactactacgggaagctcagtacctagccaagtttggaagaggttgcgctcagccacaaccccagtggtagctctgagtgatggggctcgcgacaacccccttggtaacaaggacgcttgcccgcgcgtgcactcgggtccaccttatggtgttcaccttgaccaaacgtaactagagaagcgcctactgtgctagttgggttttcctccggggccgtgaatgctgctaatcccaacctccgagcgtgtgcgcacaatccagtgttgctacgtcgtaacgcgtaagttggaggcggaacagactactttcggtaccccgtgtttccttgattttatttattcaatttatggtgacacttgttgaaatttgtgatttagcgaaattaccgctgaatttggcactgtattatttggtcgcctttcacaaaacctctgagatacccgcctcttatattgatcttctggtttacttgaacctgcagtttaaactaaatcaagtaaa

SEQ ID NO: 23876 - DNA, 822 bp, synthetic construct
  source 1..822: mol_type = other DNA
tttaaaaccaacctgggggttgttcccacccctggggcccacgtggcgccagtgctctggtttgttcagaacctttgcacgcctgttttcccttcccttaaacaaattaagcttgccgggactgaggggagtactccgactccgctccactacggtgcaccagtaaactggtatcgcggtacctttttacggagtcaccggcatccccaccctgcaacttagaagtttgaacataaaccgaccaatagaggcccggcatccagtcgagcaacggtcaagcacttctgtttccccggtccgcaaggatcgttacccgccccgactactacgggaagcctagtacctggccaaacttggaaaaggttgcgctcagccacaaccccagtggtagctctgagtgatggggctcgcggcaccccccttggtgacaaggacgcttgcccgcgcgtgcactcgggttcaccctccggtgttcaccttgaccaagcgtaactagagaagcgcctactgtgctagttgggttttcctccggggccgtgaatgctgctaatcccaacctccgagcgtgtgcgcacaatccagtgttgctacgtcgtaacgcgtaagttggaggcggaacagactactttcggtaccccgtgtttcctttattttatttaccaaatttatggtgacaattgttgagatttgtgatttagcgaaattacctttgaatttggcattatactacttggttgcatttcataaaacctcagagatacctgcatcctatatagatctccttgtctatttgaacctacagtgtaaattaaaccaaataaa

SEQ ID NO: 23877 - DNA, 814 bp, synthetic construct
  source 1..814: mol_type = other DNA
tttaaaacagcctgggggttgtacccacccctggggcccacgcggcgctagtactctggttcgcttagaacctttgtacgcctgtttttccctcccttaaacaaattaagatctctgccaatgtggggagtagtccgactccgcaccgatacgtcgcaccagcagaccggttcgcctaggacccttctgcggattggtatgagtaccccccctgtaacttagaagtattgaacaaatcgaccaataggtgcgtggcagccagccatgttacggtcaagcacttctgtttccccggcccgaaagggtcgttacccgcccttcccactacgagaagcctattaactaccgaaggtgacaaggagttgcgctcggccatgaccccgatggtagctctgagggatggagctcgcagttcccccgtggtaacacggttgcttgctcgcgcgtgccctcgggtccagccgaaaggctggtcactccgaatcatcgtacgtagccaagagcccattgtgctgggaaggttctcctccggagccgtgaatgctgctaatcccaacctccgagcgtgtgcgcacaatccagtgttgctacgtcgtaacgcgtaagttggaggcggaacagactactttcggtactccgtgtttccatttattttattattacatttatggtgacactatctgagatttgtgaaattgctaaattgccactgaatattgcactctactacctggtatctttctacaaaacctctgaactcaccattgagcttattgacttcttagtttttctaaataaaaacaggctgaaaacg

SEQ ID NO: 23878 - DNA, 814 bp, synthetic construct
  source 1..814: mol_type = other DNA
tttaaaacaagctgggggttgtacccacccctggggcccacgcggcgccagtactctggttcgattaggacctttgtacgcctgtttttccctcccttaaataaatcaagatctctgccaatgtggggagtagtccgactccgcaccgatacgtcgcaccagcagatcggttcgctcaggacccctctgcggattggtatgagtcccccccccgtaacttagaagttttgaaccaaccgaccaataggcgcgtggtatccagccatgttacggtcaagcacttctgtttccccggtccgaaaggatcgttacccgccctacccactacgagaagcctattaaccgctgaaagtggtacggagttgcgctcagccatgaccccgatggtagctctgagggatggagctcgcagttcccccgtggtaacacggttgcttgctcgcgtgtgccctcgggtccgatcgtaagatcgttcactccaaaccaccgtatgcggccaagagcctattgtgctgggaaggttttcctccggagccgtgaatgctgctaatcctaacctccgagcgtgtgcgcacaacccagtgttgctacgtcgtaacgcgtaagtcgggggcggaacagactactttcggtactccgtgtttcctttaaattttatatttcatttatggtgacactgactgagatttgtgagattgctaaattgccgctcaatatagcactgtactaccttgtgtcattttacaaaacctcagaactcaccgtcgagcttattgacttccttgtctttttaaataaaaacaaactgagaaca

SEQ ID NO: 23879 - DNA, 821 bp, synthetic construct
  source 1..821: mol_type = other DNA
tttaaaacagcctgggggttgtccccacccctggggcccacgtggcgctagtgctctggtttgctcagaacctttgcacgcctgttttcccttccctaaataaattaagcttaccggaactgaggggagtactccgactccgctccactacggtgcaccagtaaactggtatcacggtacctttttacggagttaccggtattcccaccccgtaacttagaagcttgaacacaaaccgaccaatagaggcccggcatccagtcgagcaacggtcaagcacttctgtttccccggtccgtaaggatcgttacccgccccgactactacggaaagcttagtatctagccaagcttggaagaggttgcgctcagccacaaccccagtggtagctctgagtgatggggctcgcgacaacccccttggtaacaagggcgcttgcccgcgcgtgcactcgggttcacctttcggtgttcaccttgaccaagtgtaactagagaagcgcctactgtgctagttgggttttcctccggggccgtgaatgctgctaatcccaacctccgagcgtgtgcgcacaatccagtgttgctacgtcgtaacgcgtaagttggaggcggaacagactactttcggtaccccgtgtttccttgattttacttattaaatttatggtgacaattgctgagatttgtgatttggcaaaattacctttgaacttggcattgtattatttagttgcttttcacaaaacttctgaaattcccgcgtcatacgttgatcttcttgtttatttgaatctccagcataaagttaagtcaagtaag

SEQ ID NO: 23880 - DNA, 821 bp, synthetic construct
  source 1..821: mol_type = other DNA
ttttaaaacccgtgggggttgttcccacccctggggcccacgtggcgctagtgctctggttcgttagaacctttgcacgcctgttttccctcccttaaacaaattaaacttaccggtactgaggggagtagtccggctccgctccactacggtgcaccagtagactggtatcacggtacctttctacggagttaccggtatccctcaccctgtaacttagaagcttgaacatgaatcgaccaatagcggctcggcagccagtcgggcaacggtcaagcacttctgtctccccggtccgcaaggatcgttacccgccctaactactacgggaagcttagtatctagccaagctcggaagaggttgcgttcagccacaaccccagtggtagctctgagtgatggggctcgcgacatcccccttggcaacaaggacgcttgcccgcgcgtgcactcgggttcacctcttggtgttcacctcgaccaagcgtaactagagaagcgcctactgtgctagttgggttttcctccggggccgtgaatgctgctaatcccaacctccgagcgtgtgcgcacaatccagtgttgctacgtcgtaacgcgcaagttggaggcggaacagactactttcggtaccccgtgtttcctttatttgtttatttgatttatggtgacaattgttgagatttgtgatttagcgagattaccacttgaatttggcattgtattatttggttgctttccacaagacttctgatataccccaattcctacattgacctattggtttacttaaatttacaatacaagctgaaccagataaa

SEQ ID NO: 23881 - DNA, 540 bp, synthetic construct
  source 1..540: mol_type = other DNA
tttaaaacagcctgggggttgtacccaccctcggggcccacgtggcgccagtactctggttcgcatagaacctttgtacgcctgttttcccctcccttaaacaaattaagatctctgccaatgtggggagtagtccgactccgcaccgatacgtcgcaccagcagaccggttcgcttaggacccttctgtggattggcatgagcaccccccccgaaacttagaagcacgcgacaaaccgaccaacaggcgcgtggcatccagccatgttacggtcaagcacttctgtttccccggtcagcaatgatcgtcacccgccctacccactacgagaagcctattaactactgaaagtgacaaagagttgcgctcagccatgcccctgatggtagctctgaggaatggagctcgcattccccccgcggtaacgcggttgcttgctcgcgcgtgtcctcgggttcgaccacacggtcgttcactctaagtcatcgtaagtagccaagagcctattgtgctgggaaggttttcctccggagccgtga

SEQ ID NO: 23882 - DNA, 814 bp, synthetic construct
  source 1..814: mol_type = other DNA
tttaaaaccacctgggggttgtacccacccctggggcccacgtggcgccagtacactggttcgcttagaacccttgtacgcctgtttttccttcccttaaacaaattaagatctctgccaatgtggggagtagtccgactccgcaccgatacgtcgcaccagcagaccggttcgcttaggacccttctgcggattggtatgagtccctcacccgtaacttagaagtaatgaacaaactgaccaataggcgcgtggcatccagccatgttacggtcaagcacttctgtctccccggtccaacaggatcgttacccgccctacccactacgagaagcctattaactaccgaaagtgacgaggtgttgcgttcagccgtgaccccgacggtagctctgagggatggagctcgcacctcccccgcggtaacgcggttgcctgctcgcgcgtgccctcgggtccgaccatatggtcgttcacaccaaatcactgtacgtagccaagagcctattgtgctgggaaggttttcctccggagccgtgaatgctgctaatcccaacctccgagcgtgtgcgcacaatccagtgttgctacgtcgtaacgcgtaagtcggaggcggaacagactactttcggtactccgtgtttccttatattttattatttcatttatggtgacattatctgagatttgcgaaattgctaaattgccactgaacattgcactgtactatttagtgtcattttataaaacctcagaactcactgtggaacttattgacttccttgtcttcctcaacaaaaacaaactcagaaat

SEQ ID NO: 23883 - DNA, 821 bp, synthetic construct; identical to SEQ ID NO: 21506
  source 1..821: mol_type = other DNA

SEQ ID NO: 23884 - DNA, 652 bp, synthetic construct; identical to SEQ ID NO: 789
  source 1..652: mol_type = other DNA

SEQ ID NO: 23885 - DNA, 820 bp, synthetic construct
  source 1..820: mol_type = other DNA
tttaaaacagcctgggggttgttcccacccccggggcccatgtggcgctagtgctctggtttgctcagaacctttgcacgcctgttttcccttccctaaacaaattaagcttaccggaactgaggggagtactccgactccgctccactacggtgcaccagtaaactggtatcacggtacctttttacggagttaccggtattcctaccccgtaacttagaagcttgaacacaaaccgaccaatagaggcccggcatccagtcgagcaacggtcaagcacttctgtttccccggtccgcaaggatcgttacccgccctgactactacggacagcttagtatctagccaagcttggaagaggttgcgctcagccacaaccccagtggtagctctgagtgatggggctcgcgataacccccttggtaacaaggacgcttgcccgcgcgcgcactcgggttcacctttcggtgatcaccttgaccaagtgtaactagagaagcgcctactgtgctagttgggttttcctccggggccgtgaatgctgctaatcccaacctccgagcgtgtgcgcacaatccagtgttgctacgtcgtaacgcgcaagttggaggcggaacagactactttcggtaccccgtgtttccttaattttattcattaaatttatggtgacaattgttgagatttgtgatttggcaaagttacctttgaacttggcattgtattacttagttgcttttcacaaaacttctgagattcccgcgttatacgttgatcttcttgtttatttgaatctccagtacaagttaagccaagtaag

SEQ ID NO: 23886 - DNA, 803 bp, synthetic construct
  source 1..803: mol_type = other DNA
ggggttcccacccccggggcccacgtggcgctagtgctctggtccacatagaacccttgcacgcctgtttttccctccctaaacaaattaagcttaccggaactgaggggagtactccgactccgctccactacggtgcaccagtaaactggtatcacggtacctttttacggagttaccggtattccttcaccccgtaacttagaagcacgcacaccaatcgaccaatagcggctcagtacccaactgggcaacggtcaagcacttctgtttccccggtccgtaaggatcgttatccgcccattctgctacgggaggcctagtaactagccaaatttgcgagaggttgcgctcagccacaaccccagtggtagctctgagtgatggggctcgcggttacccccttggtaacaaggacgcttgcccgcgcgtgcactcgggttcacctgatggtgttcacctcaaccaaatgcaactagtgaagagccaactgtgccagtttggtttcctccggggccgtgaatgctgctaatcccaacctccgagcgtgtgcgcacaatccagtgttgctacgtcgtaatgcgtaagttggaggcggaacagactactttcggtaccccgtgtttcctgtattttattactaaatttatggtgacaattgttgagatttgcgaacttgcgaaattaccattgaacttggcattgtattacttggttgcttttcataagacttctgagatacctgcctcttacattgacctcttggtttatctaaatttacagtacaagctcaatcaagtaaa

SEQ ID NO: 23887 - DNA, 818 bp, synthetic construct; identical to SEQ ID NO: 19584
  source 1..818: mol_type = other DNA

SEQ ID NO: 23888 - DNA, 1000 bp, synthetic construct; identical to SEQ ID NO: 16977
  source 1..1000: mol_type = other DNA

SEQ ID NO: 23889 - DNA, 1000 bp, synthetic construct
  source 1..1000: mol_type = other DNA
cgctgtattacggttcccgcccgggacaactggtaccccattaggctacaacatggctgaaaagggtactgggtccccccggattgtgtccgtctgcagtgtgtgtaacgtggtttaccatctccactaacattggactaagcatttcatctttcctccccgattgtgtactcacttggctaacgctgggtggtcgcggttgggtccttgatttactttttctcgtctaagcattccaactgtcctccccgattatgtgctcattcagttaactgctgggtggtcatgactaatatcgaggaaccttctgtccacgcttactttgagctccggtcgcttgacgcttgtagggcgatagggttatcttcctgacaacatctttattctaccttcataggctctatctatgaagacggagtgtggcacccgtcccttctttgggagcttcggtagtgacgccctttgtcactctcgccagccgaggcatgcctggtgccaggtagcaaagaaagcatatgcttaaggacttgattgatttagcgcaagagtttgtagtgatgtccatagtgtctgcggattccccacacggcgacgtgtgccgcggaggccaaaagccacggtgttcacagcacccctatggatgcccacagaccccagtgggcactcttgttgccggactttcaggaaattaggtataggctcttctcaaactcctggcattggactaggtaagaatgccccggaggtaccccagtactccttcgggagtctgggatctgaccgggggccccacaaacatgctttacgtgtttcgtgcggtcaaaaattgtctaactagtcccaaccttgaacaagggattgttctttcctttttattactgagactggcctatggtgacaacagagattgactgtgaatacagttattttctggtgttcatcatctggttttatacagtgctcttatacctttgtggtattcttcaattagataggcaag

SEQ ID NO: 23890 - DNA, 1000 bp, synthetic construct
  source 1..1000: mol_type = other DNA
cactacactacggttcccgcccgggacaactggtaccccattaagccacaacatggctgaaaagggtattgggtccccccggattgtgtccgtttgtagtgtgtgtaacgtggtttaccatctccactaacattggactaagcatttcatctttcctccccgattgtgtactcacttggctaacgctgggtggtcgcggttgggtccttgatttactttttctcgtctaagcattccgactgtcctccccgattatgtgctcattcagttaactgctgggtggtcatgactaatatcgaggaaccttctgtctacgcttactttgagctccggtcgcttgacgcttgtagggcgatagggttatcttcccaacaacatctttattctacctccataggttctatctatggagacggagtgtggcacccgtcccttctttgggagcttcggtagcgacgccctttgtcgctctcgccagccgaggcatgcctggtgccaggtagcaaagaaagcatatgctcaaggacttgactgatttagcgcaagagtttgtagcgatgtccatagtgtctgcggattccccacacggcgacgtgtgccgcggaggccaaaagccacggtgttcacagcacccctatggatgcccacagaccccagtgggcactcttgttgccggactttcaggaaattaggtataggctcttctcaaactcctggcattggactaggtaagaatgccccggaggtaccccagtactccttcgggagtctgggatctgaccgggggccccacaaacatgctttacgtgtttcgtgcggtcaaaaattgtctaactagtcccaaccttgaacaagggattgttctttcctttttattactgagactggcctatggtgacaacagagattgactgtgaatacagttgttttctggtgttcatcatctggttatacacagtgctcttttaactttttggtaactctcagttatacaagcaag

SEQ ID NO: 23891 - DNA, 1000 bp, synthetic construct; identical to SEQ ID NO: 1475
  source 1..1000: mol_type = other DNA

SEQ ID NO: 23892 - DNA, 1000 bp, synthetic construct; identical to SEQ ID NO: 1462
  source 1..1000: mol_type = other DNA

SEQ ID NO: 23893 - DNA, 1000 bp, synthetic construct; identical to SEQ ID NO: 16956
  source 1..1000: mol_type = other DNA

SEQ ID NO: 23894 - DNA, 1000 bp, synthetic construct; identical to SEQ ID NO: 16967
  source 1..1000: mol_type = other DNA

SEQ ID NO: 23895 - DNA, 1000 bp, synthetic construct; identical to SEQ ID NO: 16960
  source 1..1000: mol_type = other DNA

SEQ ID NO: 23896 - DNA, 1000 bp, synthetic construct; identical to SEQ ID NO: 16964
  source 1..1000: mol_type = other DNA

SEQ ID NO: 23897 - DNA, 1000 bp, synthetic construct; identical to SEQ ID NO: 1474
  source 1..1000: mol_type = other DNA

SEQ ID NO: 23898 - DNA, 1000 bp, synthetic construct; identical to SEQ ID NO: 1461
  source 1..1000: mol_type = other DNA

SEQ ID NO: 23899 - DNA, 1000 bp, synthetic construct; identical to SEQ ID NO: 1464
  source 1..1000: mol_type = other DNA

SEQ ID NO: 23900 - DNA, 1000 bp, synthetic construct; identical to SEQ ID NO: 1459
  source 1..1000: mol_type = other DNA

SEQ ID NO: 23901 - DNA, 891 bp, synthetic construct; identical to SEQ ID NO: 17022
  source 1..891: mol_type = other DNA

SEQ ID NO: 23902 - DNA, 1000 bp, synthetic construct; identical to SEQ ID NO: 1469
  source 1..1000: mol_type = other DNA

SEQ ID NO: 23903 - DNA, 977 bp, synthetic construct; identical to SEQ ID NO: 1453
  source 1..977: mol_type = other DNA

SEQ ID NO: 23904 - DNA, 1000 bp, synthetic construct; identical to SEQ ID NO: 1472
  source 1..1000: mol_type = other DNA

SEQ ID NO: 23905 - DNA, 1000 bp, synthetic construct; identical to SEQ ID NO: 1466
  source 1..1000: mol_type = other DNA

SEQ ID NO: 23906 - DNA, 1000 bp, synthetic construct; identical to SEQ ID NO: 16983
  source 1..1000: mol_type = other DNA

SEQ ID NO: 23907 - DNA, 806 bp, synthetic construct; identical to SEQ ID NO: 17044
  source 1..806: mol_type = other DNA

SEQ ID NO: 23908 - DNA, 1000 bp, synthetic construct; identical to SEQ ID NO: 1457
  source 1..1000: mol_type = other DNA

SEQ ID NO: 23909 - DNA, 489 bp, synthetic construct; identical to SEQ ID NO: 514
  source 1..489: mol_type = other DNA

SEQ ID NO: 23910 - DNA, 466 bp, synthetic construct; identical to SEQ ID NO: 502
  source 1..466: mol_type = other DNA

SEQ ID NO: 23911 - DNA, 1000 bp, synthetic construct; identical to SEQ ID NO: 16858
  source 1..1000: mol_type = other DNA

SEQ ID NO: 23912 - DNA, 1000 bp, synthetic construct; identical to SEQ ID NO: 1455
  source 1..1000: mol_type = other DNA

SEQ ID NO: 23913 - DNA, 826 bp, synthetic construct; identical to SEQ ID NO: 2459
  source 1..826: mol_type = other DNA

SEQ ID NO: 23914 - DNA, 700 bp, synthetic construct; identical to SEQ ID NO: 15117
  source 1..700: mol_type = other DNA

SEQ ID NO: 23915 - DNA, 731 bp, synthetic construct; identical to SEQ ID NO: 2347
  source 1..731: mol_type = other DNA

SEQ ID NO: 23916 - DNA, 692 bp, synthetic construct; identical to SEQ ID NO: 2300
  source 1..692: mol_type = other DNA

SEQ ID NO: 23917 - DNA, 619 bp, synthetic construct; identical to SEQ ID NO: 715
  source 1..619: mol_type = other DNA

SEQ ID NO: 23918 - DNA, 597 bp, synthetic construct; identical to SEQ ID NO: 2163
  source 1..597: mol_type = other DNA

SEQ ID NO: 23919 - DNA, 250 bp, synthetic construct; identical to SEQ ID NO: 15147
  source 1..250: mol_type = other DNA

SEQ ID NO: 23920 - DNA, 745 bp, synthetic construct; identical to SEQ ID NO: 19231
  source 1..745: mol_type = other DNA

SEQ ID NO: 23921 - DNA, 743 bp, synthetic construct; identical to SEQ ID NO: 19144
  source 1..743: mol_type = other DNA

SEQ ID NO: 23922 - DNA, 745 bp, synthetic construct; identical to SEQ ID NO: 19234
  source 1..745: mol_type = other DNA

SEQ ID NO: 23923 - DNA, 745 bp, synthetic construct; identical to SEQ ID NO: 19232
  source 1..745: mol_type = other DNA

SEQ ID NO: 23924 - DNA, 744 bp, synthetic construct; identical to SEQ ID NO: 19265
  source 1..744: mol_type = other DNA

SEQ ID NO: 23925 - DNA, 647 bp, synthetic construct; identical to SEQ ID NO: 781
  source 1..647: mol_type = other DNA

SEQ ID NO: 23926 - DNA, 743 bp, synthetic construct; identical to SEQ ID NO: 19252
  source 1..743: mol_type = other DNA

SEQ ID NO: 23927 - DNA, 745 bp, synthetic construct; identical to SEQ ID NO: 19233
  source 1..745: mol_type = other DNA

SEQ ID NO: 23928 - DNA, 558 bp, synthetic construct
  source 1..558: mol_type = other DNA
tctcgtataagctgtacccacggctgaaaacaagtgatccgttatccgcttaggtacttcgagaagcctagtatcaccttgggatcttcgacgcgttgcactcagcactctaacccgagtgtagcttaggctgatgagtctgggcattccccaccggtgacggtggcccaggctgcgttggcggcctacccatggctaatgccatgggacgctagttgtgaacaaggtgtgaagagcccattgagctacctaagagtcctccggcccctgaatgcggctaatcccaaccacggagcaagtgccctcaatccagagggtggcttgtcgtaacgcgcaagtctgtggcggaaccgactactttgggtgtccgtgtttccttttattttcattacggctgcttatggtgacaatcattgattgccatcataaagcaagttggattggccatccggtgaaagttaagtatctcgtccacttaactgttgggcttgctccattaactctactcacgcctgatttaatatctatagtgttattgatttggaaaaagctatcata

SEQ ID NO: 23929 - DNA, 596 bp, synthetic construct; identical to SEQ ID NO: 644
  source 1..596: mol_type = other DNA

SEQ ID NO: 23930 - DNA, 558 bp, synthetic construct
  source 1..558: mol_type = other DNA
tctcgtataggctgtacccacggctgaaaacaagtgacccgttatccgcttaggtacttcgagaagcctagtatcacctcgggatcttcgacgcgttgcactcagcactctaccccgagtgtagcttaggctgatgagcctgggcattccccaccggtgacggtggcccaggctgcgttggcggcctacccatggctaacgccatgggacgctagttgtgaacaaggtgtgaagagcctattgagctacctaagagtcctccggcccctgaatgcggctaatcccaaccacggagcaagtgccctcaatccagagggtggcttgtcgtaacgcgcaagtctgtggcggaaccgactactttgggtgtccgtgtttccttttatttttactatggctgcttatggtgacaatcattgattgccatcataaagcgagttggattggccatccggtgaaagttaagtatctcgtccacttatctgttggatttcctccattaacccaactcacgcctgttttgatatctatagtgttattgatttggaaaaagctatcata

SEQ ID NO: 23931 - DNA, 679 bp, synthetic construct; identical to SEQ ID NO: 818
  source 1..679: mol_type = other DNA

SEQ ID NO: 23932 - DNA, 558 bp, synthetic construct
  source 1..558: mol_type = other DNA
tctcgtataggctgtacccacggctgaaaacaagtgatccgttatccgcttaggtacttcgagaagcctagtatcaccttgggatcttcgacgcgttgcactcagcactctaccccgagtgtagcttaggctgatgagtctgggcattccccaccggtgacggtggcccaggctgcgttggcggcctacccatggctaatgtcatgggacgctagttgtgaacaaggtgtgaagagcctattgagctacctaagagtcctccggcccctgaatgcggctaatcccaaccacggagcaagtgccctcaatccagagggtggcttgtcgtaacgcgtaagtctgtggcggaaccgactactttgggtgtccgtgtttccttttatttttattacggctgcttatggtgacaatcattgattgccatcataaagcgagttggattggccatccggtgaaagttgagtatctcgtccacttatctgtcgggattgctccattaactctattcacgcctgatttgatatctacggtgttattgattcggaaaaagctatcata

SEQ ID NO: 23933 - DNA, 576 bp, synthetic construct; identical to SEQ ID NO: 16888
  source 1..576: mol_type = other DNA

SEQ ID NO: 23934 - DNA, 576 bp, synthetic construct; identical to SEQ ID NO: 16936
  source 1..576: mol_type = other DNA

SEQ ID NO: 23935 - DNA, 576 bp, synthetic construct; identical to SEQ ID NO: 16882
  source 1..576: mol_type = other DNA

SEQ ID NO: 23936 - DNA, 576 bp, synthetic construct; identical to SEQ ID NO: 16886
  source 1..576: mol_type = other DNA

SEQ ID NO: 23937 - DNA, 576 bp, synthetic construct; identical to SEQ ID NO: 16932
  source 1..576: mol_type = other DNA

SEQ ID NO: 23938 - DNA, 576 bp, synthetic construct; identical to SEQ ID NO: 16938
  source 1..576: mol_type = other DNA

SEQ ID NO: 23939 - DNA, 577 bp, synthetic construct; identical to SEQ ID NO: 16921
  source 1..577: mol_type = other DNA

SEQ ID NO: 23940 - DNA, 577 bp, synthetic construct; identical to SEQ ID NO: 16879
  source 1..577: mol_type = other DNA

SEQ ID NO: 23941 - DNA, 576 bp, synthetic construct; identical to SEQ ID NO: 16895
  source 1..576: mol_type = other DNA

SEQ ID NO: 23942 - DNA, 576 bp, synthetic construct; identical to SEQ ID NO: 16893
  source 1..576: mol_type = other DNA

SEQ ID NO: 23943 - DNA, 576 bp, synthetic construct; identical to SEQ ID NO: 16894
  source 1..576: mol_type = other DNA

SEQ ID NO: 23944 - DNA, 576 bp, synthetic construct; identical to SEQ ID NO: 16889
  source 1..576: mol_type = other DNA

SEQ ID NO: 23945 - DNA, 576 bp, synthetic construct; identical to SEQ ID NO: 16939
  source 1..576: mol_type = other DNA

SEQ ID NO: 23946 - DNA, 576 bp, synthetic construct; identical to SEQ ID NO: 16918
  source 1..576: mol_type = other DNA

SEQ ID NO: 23947 - DNA, 577 bp, synthetic construct; identical to SEQ ID NO: 16933
  source 1..577: mol_type = other DNA

SEQ ID NO: 23948 - DNA, 576 bp, synthetic construct; identical to SEQ ID NO: 16887
  source 1..576: mol_type = other DNA

SEQ ID NO: 23949 - DNA, 576 bp, synthetic construct; identical to SEQ ID NO: 16884
  source 1..576: mol_type = other DNA

SEQ ID NO: 23950 - DNA, 576 bp, synthetic construct; identical to SEQ ID NO: 16883
  source 1..576: mol_type = other DNA

SEQ ID NO: 23951 - DNA, 576 bp, synthetic construct; identical to SEQ ID NO: 16904
  source 1..576: mol_type = other DNA

SEQ ID NO: 23952 - DNA, 576 bp, synthetic construct; identical to SEQ ID NO: 16892
  source 1..576: mol_type = other DNA

SEQ ID NO: 23953 - DNA, 576 bp, synthetic construct; identical to SEQ ID NO: 16891
  source 1..576: mol_type = other DNA

SEQ ID NO: 23954 - DNA, 576 bp, synthetic construct; identical to SEQ ID NO: 16901
  source 1..576: mol_type = other DNA

SEQ ID NO: 23955 - DNA, 576 bp, synthetic construct; identical to SEQ ID NO: 16902
  source 1..576: mol_type = other DNA

SEQ ID NO: 23956 - DNA, 576 bp, synthetic construct; identical to SEQ ID NO: 16898
  source 1..576: mol_type = other DNA

SEQ ID NO: 23957 - DNA, 576 bp, synthetic construct; identical to SEQ ID NO: 16896
  source 1..576: mol_type = other DNA

SEQ ID NO: 23958 - DNA, 579 bp, synthetic construct; identical to SEQ ID NO: 632
  source 1..579: mol_type = other DNA

SEQ ID NO: 23959 - DNA, 578 bp, synthetic construct; identical to SEQ ID NO: 630
  source 1..578: mol_type = other DNA

SEQ ID NO: 23960 - DNA, 576 bp, synthetic construct
  source 1..576: mol_type = other DNA
tttgaaaagggggtgggggggcctcggccccctcaccctcttttccggcggccactcgcccgggccaccgttacttcactccactccctcgggactggtttggaggaacataacagggcttcccatccctgttgacccttcactccactcacccttctccttaaccaaccctatccacacccactgattgatccctttggattttgacctcagaatgcctacttgacctcccacttgcctttcccttctcggattgccggtggtgcccggcggaaaaagcacaagtgtgttgcaggctaccaaactcctacccgacaaaggtgcgtgtccgcgtgctgagtaatgggataggagatgcctacaacaggctcgcccatgagtagagcatggactgcggtgcatgtgacttcggtcaccacgggcatagcattgctcacccgtgaatcaagtcatcgagattcctctgacctctgaagtgcactgtggttgcgtggctgggaatccacgcttgaccatgtactgcttgatagagtcgcggctggccgactcatgggttaaagtcagttgacaagacac

SEQ ID NO: 23961 - DNA, 576 bp, synthetic construct; identical to SEQ ID NO: 16885
  source 1..576: mol_type = other DNA

SEQ ID NO: 23962 - DNA, 577 bp, synthetic construct; identical to SEQ ID NO: 16931
  source 1..577: mol_type = other DNA

SEQ ID NO: 23963 - DNA, 577 bp, synthetic construct
  source 1..577: mol_type = other DNA
tttgaaaagggggtgggggggcttcggccctctcaccctcttttccggtggccactcgcccgggccaccgttacttcactccactccctcgggactggtttggaggaacataacagggcttcccacccctgtttacccttaattccacttacccttccccttaaccaaccctatccacaccccactgactgattcctttggattttgacctcagaacgcctacttgacctcccacttgcctctcccttctcggattgccggtggtgcctggcggaaaaagcacaagtgtgttgcagactaccaaactcctacccgacaaaggtgcgtgtccgcgtgctgagtaatgggataggagatgcctacaacaggctcgcccatgagtagagcatggactgcggtgcatgtgactttggtcaccacgggcatagcattgctcacccgtgaatcaagtcatcgagatttctctgacctctgaagtgcactgtggttgcgtggctgggaatccacgcttgaccatgtactgcttgatagagtcgcggctggccgactcatgggttaaagtcagttgacaagactc

SEQ ID NO: 23964 - DNA, 577 bp, synthetic construct
  source 1..577: mol_type = other DNA
tttgaaaagggggtgggggggcttcggccctctcaccctcttttccggtggccactcgcccgggccaccgttacttcactccactccctcgggactggtttggaggaacataacagggcttcccacccctgtttacccttaattccacttacccttccccttaaccaaccctatccacaccccactgactgattcctttggattttgacctcagaacgcctacttgacctcccacttgcctctcccttctcggattgccggtggtgcctggcggaaaaagcacaagtgtgttgcagactaccaaactcctacccgacaaaggtgcgtgtccgcgtgctgagtaatgggataggagatgcctacaacaggctcgcccatgagtagagcatggactgcggtgcatgtgactttggtcaccacgggcatagcattgctcacccgtgaatcaagtcatcgagatttctctgacctctgaagtgcactgtggttgcgtggctgggaatccacgcttgaccatgtactgcttgatagagtcgcggctggccgactcatgggttaaagtcagttgacaagacac

SEQ ID NO: 23965 - DNA, 576 bp, synthetic construct; identical to SEQ ID NO: 16905
  source 1..576: mol_type = other DNA

SEQ ID NO: 23966 - DNA, 576 bp, synthetic construct; identical to SEQ ID NO: 16900
  source 1..576: mol_type = other DNA

SEQ ID NO: 23967 - DNA, 576 bp, synthetic construct; identical to SEQ ID NO: 16899
  source 1..576: mol_type = other DNA

SEQ ID NO: 23968 - DNA, 576 bp, synthetic construct; identical to SEQ ID NO: 16890
  source 1..576: mol_type = other DNA

SEQ ID NO: 23969 - DNA, 577 bp, synthetic construct; identical to SEQ ID NO: 16934
  source 1..577: mol_type = other DNA

SEQ ID NO: 23970 - DNA, 577 bp, synthetic construct; identical to SEQ ID NO: 16937
  source 1..577: mol_type = other DNA

SEQ ID NO: 23971 - DNA, 576 bp, synthetic construct; identical to SEQ ID NO: 16897
  source 1..576: mol_type = other DNA

SEQ ID NO: 23972 - DNA, 569 bp, synthetic construct; identical to SEQ ID NO: 618
  source 1..569: mol_type = other DNA

SEQ ID NO: 23973 - DNA, 577 bp, synthetic construct
  source 1..577: mol_type = other DNA
tttgaaaagggggtgggggggattcggccctctcaccctcttttccggtggccactcgcccgggccaccgttacttcactccactccctcgggactggtttggaggaacataacagggcttcccacccctgtttacccttaattccacttacccttccccttaaccaaccctatccacaccccactgactgattcctttggattttgacctcagaacgcctacttgacctcccacttgcctctcccttctcggattgccggtggtgcctggcggaaaaagcacaagtgtgttgcagactaccaaactcctacccgacaaaggtgcgtgtccgcgtgctgagtaatgggataggagatgcctacaacaggctcgcccatgagtagagcatggactgcggtgcatgtgactttggtcaccacgggcatagcattgctcacccgtgaatcaagtcatcgagatttctctgacctctgaagtgcactgtggttgcgtggctgggaatccacgcttgaccatgtactgcttgatagagtcgcggctggccgactcatgggttaaagtcagttgacaagacac

SEQ ID NO: 23974 - DNA, 576 bp, synthetic construct; identical to SEQ ID NO: 626
  source 1..576: mol_type = other DNA

SEQ ID NO: 23975 - DNA, 574 bp, synthetic construct; identical to SEQ ID NO: 16906
  source 1..574: mol_type = other DNA

SEQ ID NO: 23976 - DNA, 571 bp, synthetic construct; identical to SEQ ID NO: 16940
  source 1..571: mol_type = other DNA

SEQ ID NO: 23977 - DNA, 562 bp, synthetic construct; identical to SEQ ID NO: 16951
  source 1..562: mol_type = other DNA

SEQ ID NO: 23978 - DNA, 570 bp, synthetic construct; identical to SEQ ID NO: 16943
  source 1..570: mol_type = other DNA

SEQ ID NO: 23979 - DNA, 567 bp, synthetic construct; identical to SEQ ID NO: 16910
  source 1..567: mol_type = other DNA

SEQ ID NO: 23980 - DNA, 564 bp, synthetic construct; identical to SEQ ID NO: 16941
  source 1..564: mol_type = other DNA

SEQ ID NO: 23981 - DNA, 563 bp, synthetic construct; identical to SEQ ID NO: 16945
  source 1..563: mol_type = other DNA

SEQ ID NO: 23982 - DNA, 565 bp, synthetic construct; identical to SEQ ID NO: 16948
  source 1..565: mol_type = other DNA

SEQ ID NO: 23983 - DNA, 566 bp, synthetic construct; identical to SEQ ID NO: 16946
  source 1..566: mol_type = other DNA

SEQ ID NO: 23984 - DNA, 563 bp, synthetic construct; identical to SEQ ID NO: 16950
  source 1..563: mol_type = other DNA

SEQ ID NO: 23985 - DNA, 568 bp, synthetic construct; identical to SEQ ID NO: 16944
  source 1..568: mol_type = other DNA

SEQ ID NO: 23986 - DNA, 797 bp, synthetic construct; identical to SEQ ID NO: 1241
  source 1..797: mol_type = other DNA

SEQ ID NO: 23987 - DNA, 560 bp, synthetic construct; identical to SEQ ID NO: 16955
  source 1..560: mol_type = other DNA

SEQ ID NO: 23988 - DNA, 562 bp, synthetic construct; identical to SEQ ID NO: 16973
  source 1..562: mol_type = other DNA

SEQ ID NO: 23989 - DNA, 557 bp, synthetic construct
  source 1..557: mol_type = other DNA
ggcttcggccctctcaccctcttttccggtggccactcgcccgggccaccgttactccactccactccttcgggactggtttggaggaacacaacagggcttcccacccctgtttaccttttatccactcaccttatcccttgaccaaccctatccacaccccactgactgactcctttggattttgacctcagaatgcctacctgacctcccacttgcctctcccttctcggattgccggtggtgcctggcggaaaaagcacaagtgtgttgttggctaccaaactcctacccgacaaaagtgcgtgtccgcgtgctgagtaatgggataggagatgccaacgacaggctcgcccatgagtagagcatggactgcggtgcatgtgacttcggtcaccaggggcatagcattgctcacccctgaatcaagtcatcgagacttctctgacctctgaagtgcactgtggttgcgtggctgggaatccacgcttgaccatgtactgcttgatagagtcgcggctggccgactcatgggttaaagtcagttgacaagacac

SEQ ID NO: 23990 - DNA, 559 bp, synthetic construct; identical to SEQ ID NO: 16958
  source 1..559: mol_type = other DNA

SEQ ID NO: 23991 - DNA, 561 bp, synthetic construct; identical to SEQ ID NO: 16953
  source 1..561: mol_type = other DNA

SEQ ID NO: 23992 - DNA, 558 bp, synthetic construct; identical to SEQ ID NO: 1402
  source 1..558: mol_type = other DNA

SEQ ID NO: 23993 - DNA, 566 bp, synthetic construct; identical to SEQ ID NO: 16947
  source 1..566: mol_type = other DNA

SEQ ID NO: 23994 - DNA, 549 bp, synthetic construct; identical to SEQ ID NO: 1434
  source 1..549: mol_type = other DNA

SEQ ID NO: 23995 - DNA, 561 bp, synthetic construct; identical to SEQ ID NO: 16949
  source 1..561: mol_type = other DNA

SEQ ID NO: 23996 - DNA, 556 bp, synthetic construct; identical to SEQ ID NO: 1423
  source 1..556: mol_type = other DNA

SEQ ID NO: 23997 - DNA, 561 bp, synthetic construct; identical to SEQ ID NO: 16954
  source 1..561: mol_type = other DNA

SEQ ID NO: 23998 - DNA, 546 bp, synthetic construct; identical to SEQ ID NO: 1435
  source 1..546: mol_type = other DNA

SEQ ID NO: 23999 - DNA, 471 bp, synthetic construct; identical to SEQ ID NO: 12
  source 1..471: mol_type = other DNA

SEQ ID NO: 24000 - DNA, 537 bp, synthetic construct; identical to SEQ ID NO: 1442
  source 1..537: mol_type = other DNA

SEQ ID NO: 24001 - DNA, 743 bp, synthetic construct
  source 1..743: mol_type = other DNA
ttgaaaagggggtgggggggcctcggccccctcaccctcttttccggtggtctggtcccggaccaccgttactccattcagcttcttcggaacctgttcggaggaattaaacgggcacccatactccccccaccccccttttgtaactaagtatgtgtgctcgtgatcttgactcccacggaacggaccgatccgttggtgaacaaacagctaggtccacatcctcccttcccctgggagggcccccgccctcccacatcctccccccagcctgacgtatcacaggctgtgtgaagcccccgcgaaagctgctcacgtggcaattgtgggtccccccttcatcaagacaccaggtctttcctccttaaggctagccccggcgtgtgaattcacgttgggcaactagtggtgtcactgtgcgctcccaatctcggccgcggagtgctgttccccaagccaaacccctggcccttcactatgtgcctggcaagcatatctgagaaggtgttccgctgtggctgccaacctggtgacaggtgccccagtgtgcgtaaccttcttccgtctccggacggtagtgattggttaagatttggtgtaaggttcatgtgccaacgccctgtgcgggatgaaacctctactgccctaggaatgccaggcaggtaccccacctccgggtgggatctgagcctgggctaattgtctacgggtagtttcatttccaatccttttatgtcggagtc

SEQ ID NO: 24002 - DNA, 712 bp, synthetic construct; identical to SEQ ID NO: 1348
  source 1..712: mol_type = other DNA

SEQ ID NO: 24003 - DNA, 526 bp, synthetic construct
  source 1..526: mol_type = other DNA
ccacacgcccgggccaccgttactccactccactccttcgggactggtttggaggaacacaacagggcttcccatccctgttttccctcattccactaacccctctcccttaaccaaccccatccaaaccccactgactgattcctttggattttgacctcagaatgcctacttgacctcccacttgcctttccctttccggattgccggtggtgcctggcggaaaaagcacaagtgtgttgatggctaccaaactcctacccgacaaaggtgcgtgtccgcgtgctgagtaatgggataggagatgccattgacaggctcgcccatgagtagagcatggactgcggtgcatgtaacttcggttaccaggggcatagcattgctcacccctgaatcaagtcatcgagatttctctgacctctgaagtgcactgtggttgcgtggctgggaatccacgcttgaccatgtactgcttgatagagtcgcggctggccgactcatgggttaaagtcagttgataagacac

SEQ ID NO: 24004 - DNA, 646 bp, synthetic construct; identical to SEQ ID NO: 1350
  source 1..646: mol_type = other DNA

SEQ ID NO: 24005 - DNA, 420 bp, synthetic construct; identical to SEQ ID NO: 460
  source 1..420: mol_type = other DNA

SEQ ID NO: 24006 - DNA, 712 bp, synthetic construct; identical to SEQ ID NO: 1349
  source 1..712: mol_type = other DNA

SEQ ID NO: 24007 - DNA, 735 bp, synthetic construct; identical to SEQ ID NO: 16867
  source 1..735: mol_type = other DNA

SEQ ID NO: 24008 - DNA, 647 bp, synthetic construct; identical to SEQ ID NO: 1351
  source 1..647: mol_type = other DNA

SEQ ID NO: 24009 - DNA, 372 bp, synthetic construct
  source 1..372: mol_type = other DNA
cagacccctgtgtgaactcacaggtggcaactagtggttccactgcatgctcccgacctcggccgcggagtgctgttccccaagtcgtgacactgaccttcacttatgtgcctggcaagcatatctgagaagatgttccgctgtggctgccaaacctggtaacaggtgccccagtgtgcgtagtcttcttccgtcttcggacggtaagtgttaggtaaagatgcggcgtaaggttcaagtgccaacgccctggaagggatgacccttctactgccctaggaatgccgcgcaggtaccccaggttcgcctgggatctgagcgcgggctaattgtctacgggtagtttcatttccctctttcttaactggcacc

SEQ ID NO: 24010 - DNA, 372 bp, synthetic construct
  source 1..372: mol_type = other DNA
cagacccctgtgtgaactcacaggtggcaactagtggttccactgcatgctcccgacctcggccgcggagtgctgttccccaagtcgtgacactgaccttcacttatgtgcctggcaagcatatctgagaagatgttccgctgtggctgccaaacctggtaacaggtgccccagtgtgcgtagtcttcttccgtcttcggacggtaagtgttaggtaaagatgcggcgtaaggttcaagtgccaacgccctgggagggatgacccttctactgccctaggaatgccgtgcaggtaccccaggttcgcctgggatctgagcgcgggctaattgtctacgggtagtttcatttcccttttctttctatggcatc

SEQ ID NO: 24011 - DNA, 621 bp, synthetic construct
  source 1..621: mol_type = other DNA
cccccccccgcaactcccaagtgtgtgtgcccataatcttgactcctaccggtctgccgcccggtctagtgaacaaacagctaggcaaactccacccctcccctggtggtcggtttcctaccggccgccacaccacccccccagcctgacgtgtcacagactgtgcaaagcccccgcgaaagctgctcacgtggcaattgtgggtcccccctttgtcaaggtgtcgagtctttctccctcaaggctagcccggtgccgtgaactcggcactggcaactagtgacaccactgcacgctcccgacctcggacgcggagtgctgttccccaagtcataacactgacaccaagtcgtgctgcctggcaagcactgcctgggaagatgttccgctgtggttgccaaacctggtaacaggtgccccagtgtgtgtagtcttcctccagtcttcgaactggcggcttcgtgtaaagatgtgatgtaaggttcaagtgccaactccctggaagggatgacccttctactgctctaggaatgctgcgcaggtacccccgttctccggggatctgagcgcaggctaattgtctacgagtagtttcatttctaattcttctttcttggcatc

SEQ ID NO: 24012 - DNA, 717 bp, synthetic construct; identical to SEQ ID NO: 1336
  source 1..717: mol_type = other DNA

SEQ ID NO: 24013 - DNA, 523 bp, synthetic construct; identical to SEQ ID NO: 1337
  source 1..523: mol_type = other DNA

SEQ ID NO: 24014 - DNA, 528 bp, synthetic construct; identical to SEQ ID NO: 1443
  source 1..528: mol_type = other DNA

SEQ ID NO: 24015 - DNA, 534 bp, synthetic construct; identical to SEQ ID NO: 1338
  source 1..534: mol_type = other DNA

SEQ ID NO: 24016 - DNA, 532 bp, synthetic construct; identical to SEQ ID NO: 1444
  source 1..532: mol_type = other DNA

SEQ ID NO: 24017 - DNA, 712 bp, synthetic construct; identical to SEQ ID NO: 866
  source 1..712: mol_type = other DNA

SEQ ID NO: 24018 - DNA, 737 bp, synthetic construct
  source 1..737: mol_type = other DNA
tcttccgatctgggggcctcggccccctcaccctcttttccggtggtccggtcccagaccaccgttactccattcagcttcttcggaacctgttcggaggaattaaatgggcacccactaaccccaacccccttttcgtaactaagtgtgtgcccaatctcttgactcctgctggaaccaccgaccagcagtgtccaaaatgctaggtggaaaacctccccccccctctgggtttcgtgcccagcatcctccccccagcctgacgtgtcacaggctgtgcaaagaccccgcgaaagctgccaaaagtggcaattgtgggtcccccctttgtcaaggcgtcgagtctttctcccttaaggctagccccgtcagtgaactctgttgggcaactagtgacgccactgcatgcctccgacctcggccgcggagtgctgccccccaagtcatgcccctggccacaagttgtgctgcctggcaagcactgtctgtgagaatgttccgctgtggctgccaagcctggtaacaggctgccccagtgtgcgtagttctcatccagacctcggtctggcaacttgctgttaagacatggcgtaaggggcgtgtgccaacgccctggaacgagtgtccactctaataccccgaggaatgctacgcaggtacccctggctcgccagggatctgagcgtaggctaattgtctaagggtattttcatttcccactctctttcttgttcata

SEQ ID NO: 24019 - DNA, 764 bp, synthetic construct
  source 1..764: mol_type = other DNA
cttttccggcggcgcacgttcgcgtcgtcgtaagtctggactcccaaggccaactcggttcaacttcggtttccggacaaatacaaagagcctcagtcttcttggcactttcttacctgagttaacaaagcaagaaacccgcccctctaacgccagacgagcggcgtaaaacttgaacttctggcaacttccactaccctttccctttcccccgcccctactgcgctctcaaggtcgcgcttttctgggactagcccagatctgaaagttcctggcaccctttgccccttcaggcccttatggtaggaactgaccttgtgctgtgatctcggtgcggaagtgctactgcgtagcgattgtaagatccctttgtggttctgccttggcaaggctatagagtactgtgatccgctgcggatgccatcccggtaacgggacccccagtgtgcgcaacagtatgtccacggtcttccgtgttcaccacattcggaacactgctttcgtgaaacagtgtgtgtccaatccctgtgatcagtgtcaaccacaccacctaggaatgctaggaaggtaccccggttcgccgggatctgatcctaggctaattgtctacggtggtgctccttttattttcatctcactttattgactacagctgcttgattctgtgtttgccgctctctctgctctcactgccattctcaagtgttcacactgtccaagctcctttggttgttttcttccacttgccactgtcaactcttgtc

SEQ ID NO: 24020 - DNA, 372 bp, synthetic construct
  source 1..372: mol_type = other DNA
cagacccctgtgtgaattcacaggtggcaactagtggttccactgcatgctcccgacctcggccgcggagtgctgttccccaagtcgtaacactgacctccacttatgtgcctggcaagcatatctgaaaagatgttccgctgtggctgccaaacctggtaacaggtgccccagtgtgcgtagtcttcttccgtcttcggacggtaagtgttaggttaagatgcggcgtaaggttcaagtgccaacgccctggaagggatgtcccttctactgccctaggaatgccgcgcaggtaccccaggttcgcctgggatctgagcgcgggcttattgtctacgggtattttcatttccctttttcttctctggcatc

SEQ ID NO: 24021 - DNA, 561 bp, synthetic construct; identical to SEQ ID NO: 1358
  source 1..561: mol_type = other DNA

SEQ ID NO: 24022 - DNA, 680 bp, synthetic construct
  source 1..680: mol_type = other DNA
tccggtcccagaccaccgttactccattcagcttcttcggaacctgttcggaggaattaaatgggcacccacttcccctcgtaactccccttctaagtgtgtgcccgtaatcttaacccccacgggtctgaccgccccgtggtgaccaaaccgctaggtcgccatcctcccctcccttcccgggatcccgatcccgggacaccctccccccagcccgacgtgtcatgggctgcgtgaagaccccgcgaaagctgccaccgtggcaattgtgggtccccccttcatcaaggtgtcgagtctttctcccttaaggctagacccagtagtgaattctactgggcaactagtgacaccaatgcatgcctccgacctcggccgcggagtgctgccccccaagcggtgaaactgatcgtagactgtgttgcctggcaagcattgtctgagaaggtgttccgctgtggttgccaagcccggtaacgggtgccccagtgtgcgtaaccttcttccggtaaccccggctgtctaccgattaagccatcgtgtaaggggcgtgtgccaacgccctggaacgagtgaaatctctactgccctaggaatgccacgcaggtacccccgattcatcggggatctgagcgtgggctaattgtctaacgggtagtttcatttccctctctttttct

SEQ ID NO: 24023 - DNA, 727 bp, synthetic construct; identical to SEQ ID NO: 1308
  source 1..727: mol_type = other DNA

SEQ ID NO: 24024 - DNA, 624 bp, synthetic construct
  source 1..624: mol_type = other DNA
gtgcaaagtccccgcgaaagctgctcacgtggcaattgtgggtcccccctttgtaaaggaaccgagtctttctcccttaaggctagacccctgtgtgaactcacaggtggcaactagtggttccactgcatgctcccgacctcggccgcggagtgctgttccccaagtcataacactgacctccacttatgtgcctggcaagcatatctgagaagatgttccgctgcggctgccaaacctggtgacaggtgcctcagtgtgcgtagtcttcttccgtccttggacggtaagtgtgtggtaaagatgtggcgtaaggttcaagtgccaacgccctggaagggatgaccctctactgccctaggaatgccgcgcaggtaccccaggtacgcctgggatctgagcgcgggctaactgtctacgggtagtttcatttccctctccttctttactggcattatggcgttctcacaggtttcccgatctgtgcgctctgctgttgctgcctcctccactcaccgaatctatcatacagtcttggactactatgataggctttaccttaattcttatccccaaatgtcttatcccttgccccgtactgaatcctttccttgcccctactgc

SEQ ID NO: 24025 - DNA, 493 bp, synthetic construct; identical to SEQ ID NO: 1355
  source 1..493: mol_type = other DNA

SEQ ID NO: 24026 - DNA, 601 bp, synthetic construct
  source 1..601: mol_type = other DNA
tttaagtgttgtgcccaatctcttgactcctgctggaaccaccgaccagcagtgtccaaaatgctaggtggaaaactctcccttcccctctgggctccacgcccagcatcctccccccagcctgacgtgtcacaggctgtgcaaagaccccgcgaaagctgccaaaagtggcaattgtgggtcccccctttgtcaaggcgtcgagtctttctcccttaaggctagccccgacagtgaattctgtcgggcaactagtgacgccactgcatgcctccgacctcggccgcggagtgctgccccccaagtcatgcccctgaccacaagttgtgctgtctggcaaacactgtctgtgagaatgttccgctgtggctgccaagcctggcaacaggctgccccagtgtgtgtagttctcatccagacttcggtctggcaacttgctgttaagacatggcgtaaggggcgtgtgccaacgccctggaacgagtgtccactctaataccccgaggaatgctacgcaggtacccctggcttaccagggatctgagcgtaggctaattgtctaagggtattttcatttcccactctctctttcttgttcata

SEQ ID NO: 24027 - DNA, 438 bp, synthetic construct; identical to SEQ ID NO: 1323
  source 1..438: mol_type = other DNA

SEQ ID NO: 24028 - DNA, 679 bp, synthetic construct; identical to SEQ ID NO: 1307
  source 1..679: mol_type = other DNA

SEQ ID NO: 24029 - DNA, 487 bp, synthetic construct; identical to SEQ ID NO: 1318
  source 1..487: mol_type = other DNA

SEQ ID NO: 24030 - DNA, 710 bp, synthetic construct; identical to SEQ ID NO: 1310
  source 1..710: mol_type = other DNA

SEQ ID NO: 24031 - DNA, 306 bp, synthetic construct; identical to SEQ ID NO: 1339
  source 1..306: mol_type = other DNA

SEQ ID NO: 24032 - DNA, 710 bp, synthetic construct; identical to SEQ ID NO: 1311
  source 1..710: mol_type = other DNA

SEQ ID NO: 24033 - DNA, 710 bp, synthetic construct; identical to SEQ ID NO: 1309
  source 1..710: mol_type = other DNA

SEQ ID NO: 24034 - DNA, 947 bp, synthetic construct
  source 1..947: mol_type = other DNA
ccggaccaccgtcacaccttttagctacttcggtacctacttaggtggaattaaacgggcacccactccaactcccctctctccctcgtaactgaagtgttgtgcccataatcttgactcctgcgggtgttgtcgccccgtacagtgaacaaacagctagacaaaccctccccaccctgacggcaggtgcttcaccgccctgccgcccttcctccccccagcatgacgtgtctcatgctgtgcagagcccccgcggaagctgccaccgtggcaactgtggggcccccctctgtcaagtcaccgaggctttctcccttaaggctagaccggttgcacgaagctgtaactggcaactagtggtgacactgcacgccttcgacctcggccgcggagtgctgttccccaacctgtaacactgatcccaagctgtgctgcctggcaagcatagtctgcatggacgttccgctgcgtcagccaaacctggtgacaggtgacccagtgtgcgtagtccatgtccggatttcggtccggcagtttgcggataaagatgcagggtaaggttcaagtgccaacgccctggaaggagtgacccttctactgccctaggaatgccgcgcaggtaccccagtcccttggaactgggatctgagcgcgggctaattgtctacgggtagtttcatctcctcaaaataagaagtggcatcatggcgacaacacaggaatcacgtcttgtgcggtcaaaagtgttccactctcaaacccaccgcgtctaccatacagtcctggactgttatgataggctctacctcaagtcctaccctcaattggcctacccgctaccaaaaacaaaagtcttcccctgctacctctgcatgcatgatgaagaacattccctcctctctcctgaatcactctgtggtgaaggagctgaaatctgctggaaatgc

SEQ ID NO: 24035 - DNA, 438 bp, synthetic construct; identical to SEQ ID NO: 1328
  source 1..438: mol_type = other DNA

SEQ ID NO: 24036 - DNA, 438 bp, synthetic construct; identical to SEQ ID NO: 1327
  source 1..438: mol_type = other DNA

SEQ ID NO: 24037 - DNA, 712 bp, synthetic construct; identical to SEQ ID NO: 1305
  source 1..712: mol_type = other DNA

SEQ ID NO: 24038 - DNA, 438 bp, synthetic construct; identical to SEQ ID NO: 1321
  source 1..438: mol_type = other DNA

SEQ ID NO: 24039 - DNA, 438 bp, synthetic construct; identical to SEQ ID NO: 1325
  source 1..438: mol_type = other DNA

SEQ ID NO: 24040 - DNA, 438 bp, synthetic construct; identical to SEQ ID NO: 1324
  source 1..438: mol_type = other DNA

SEQ ID NO: 24041 - DNA, 438 bp, synthetic construct; identical to SEQ ID NO: 1326
  source 1..438: mol_type = other DNA

SEQ ID NO: 24042 - DNA, 664 bp, synthetic construct; identical to SEQ ID NO: 1316
  source 1..664: mol_type = other DNA

SEQ ID NO: 24043 - DNA, 677 bp, synthetic construct; identical to SEQ ID NO: 1312
  source 1..677: mol_type = other DNA

SEQ ID NO: 24044 - DNA, 301 bp, synthetic construct; identical to SEQ ID NO: 1340
  source 1..301: mol_type = other DNA

SEQ ID NO: 24045 - DNA, 395 bp, synthetic construct; identical to SEQ ID NO: 431
  source 1..395: mol_type = other DNA

SEQ ID NO: 24046 - DNA, 509 bp, synthetic construct; identical to SEQ ID NO: 1448
  source 1..509: mol_type = other DNA

SEQ ID NO: 24047 - DNA, 438 bp, synthetic construct; identical to SEQ ID NO: 1331
  source 1..438: mol_type = other DNA

SEQ ID NO: 24048 - DNA, 438 bp, synthetic construct; identical to SEQ ID NO: 1329
  source 1..438: mol_type = other DNA

SEQ ID NO: 24049 - DNA, 438 bp, synthetic construct; identical to SEQ ID NO: 1322
  source 1..438: mol_type = other DNA

SEQ ID NO: 24050 - DNA, 677 bp, synthetic construct; identical to SEQ ID NO: 1314
  source 1..677: mol_type = other DNA

SEQ ID NO: 24051 - DNA, 712 bp, synthetic construct; identical to SEQ ID NO: 1306
  source 1..712: mol_type = other DNA

SEQ ID NO: 24052 - DNA, 720 bp, synthetic construct; identical to SEQ ID NO: 1361
  source 1..720: mol_type = other DNA

SEQ ID NO: 24053 - DNA, 724 bp, synthetic construct; identical to SEQ ID NO: 1362
  source 1..724: mol_type = other DNA

SEQ ID NO: 24054 - DNA, 731 bp, synthetic construct; identical to SEQ ID NO: 931
  source 1..731: mol_type = other DNA

SEQ ID NO: 24055 - DNA, 641 bp, synthetic construct; identical to SEQ ID NO: 770
  source 1..641: mol_type = other DNA

SEQ ID NO: 24056 - DNA, 708 bp, synthetic construct; identical to SEQ ID NO: 1365
  source 1..708: mol_type = other DNA

SEQ ID NO: 24057 - DNA, 951 bp, synthetic construct
  source 1..951: mol_type = other DNA
tggacccggaccaccgtcacaccttttagctacttcggtacctacttaggtggaattaaacgggcacccactccaatccctctctccccttgtaactgaagtgttgtgcccataatcttgactcctgcgggtgttgtcgccccgtacagtgaacaaacagctagacaaactcctcccctccctgacggcaggtgctcaccgccctgccgcctttcctccccccagcatgacgtgtctcatgctgtgcagagcccccgcggaagctgccaccgtggcaactgtggggcccccctctgtcaagtcaccgaggctttctcccttaaggctagtccggttacacgaagctgtaactggcaactagtggtgacactgcacgccttcgacctcggccgcggagtgctgttccccaacctgtaacactgatcccaagctgtgctgcctggcaagcatagtctgcatggacgttccgctgcgtcagccaaacctggtaacaggtgacccagtgtgcgtagtccatgtccggatttcggtccggcagtttgtggataaagatgcagggtaaggttcaagtgccaacgccctggaaggagtgacccttctactgccctaggaatgccgcgcaggtaccccagttcttcggaattgggatctgagcgcgggctaattgtctacgggtagtttcatctcctcaaaacaagaagtggcatcatggcgacaacacaggaatcacgtcttgtgcggtcaaaagtgttccactctcaaacccaccgcgtctaccatacagtcctcgactgctatgataggctctacctcaagtcctaccctcaattggcttaccccctaccaaaaacaaaggtctttccctgctacctctgcatgcatgatgaagaacactcccttctctctcctgaatcactctgtggtgaaggagctgaaatctgctggaaatgc

SEQ ID NO: 24058 - DNA, 677 bp, synthetic construct; identical to SEQ ID NO: 1315
  source 1..677: mol_type = other DNA

SEQ ID NO: 24059 - DNA, 438 bp, synthetic construct; identical to SEQ ID NO: 1319
  source 1..438: mol_type = other DNA

SEQ ID NO: 24060 - DNA, 484 bp, synthetic construct; identical to SEQ ID NO: 1366
  source 1..484: mol_type = other DNA

SEQ ID NO: 24061 - DNA, 699 bp, synthetic construct; identical to SEQ ID NO: 1359
  source 1..699: mol_type = other DNA

SEQ ID NO: 24062 - DNA, 718 bp, synthetic construct; identical to SEQ ID NO: 1367
  source 1..718: mol_type = other DNA

SEQ ID NO: 24063 - DNA, 679 bp, synthetic construct; identical to SEQ ID NO: 89
  source 1..679: mol_type = other DNA

SEQ ID NO: 24064 - DNA, 555 bp, synthetic construct; identical to SEQ ID NO: 2119
  source 1..555: mol_type = other DNA

SEQ ID NO: 24065 - DNA, 496 bp, synthetic construct; identical to SEQ ID NO: 523
  source 1..496: mol_type = other DNA

SEQ ID NO: 24066 - DNA, 745 bp, synthetic construct; identical to SEQ ID NO: 19112
  source 1..745: mol_type = other DNA

SEQ ID NO: 24067 - DNA, 622 bp, synthetic construct
  source 1..622: mol_type = other DNA
aaacagcggacgggttccctaccatccgacccactgggtgtagtgctctggtattttgtacctttgcacgcctgtttcccctttgtacccacccttaatttcctccctctgtaacgttagaagtttgtgaaattaaaagtacaataggaagcatcacatccagtggtgtttagtacaagcactcctgtttccccggagcgaggtataggttgtacccacgaccgaaagcctttaaccgttatccgccaatcaactacgtaacggctagtaccatcatgtttttgatttggtgttcgatcaggtggttccccccactagtctggtcgatgaggctaggaattccccacgggtaaccgtgtcctagcctgcgtggcggccagcccagcttatgctgggacgccttttctaagacatggtgtgaagacccgcatgtgcttgattgtgagtcctccggcccctgaatgcggctaaccctaaccccggagcccagcagcataatccaatgttgtttgggtcgtaatgagcaattctgggatgggaccgactactttgggtgtccgtgtttccttttattcttatattgtttcatggtcacagcatatatattacatatactgtgatc

SEQ ID NO: 24068 - DNA, 590 bp, synthetic construct; identical to SEQ ID NO: 20876
  source 1..590: mol_type = other DNA

SEQ ID NO: 24069 - DNA, 614 bp, synthetic construct; identical to SEQ ID NO: 20698
  source 1..614: mol_type = other DNA

SEQ ID NO: 24070 - DNA, 508 bp, synthetic construct
  source 1..508: mol_type = other DNA
cgttagaagtttgtgaaattaaaagtacaataggaagcatcacatccagtggtgtttagtacaagcactcctgtttccccggagcgaggtataggttgtacccacgaccgaaagcctttaaccgttatccgccaatcaactacgtaacggctagtaccatcatgtttttgatttggtgttcgatcaggtggttccccccactagtctggtcgatgaggctaggaattccccacgggtgaccgtgtcctagcctgcgtggcggccagcccagcttatgctgggacgccttttcaaagacatggtgtgaagacccgcatgtgcttgattgtgagtcctccggcccctgaatgcggctaaccctaaccccggagcccagcagcataatccaatgttgtttgggtcgtaatgagcaattctgggatgggaccgactactttgggtgtccgtgtttccttttattcttatattgtttcatggtcacagcatatatattacatatactgtgatc

SEQ ID NO: 24071 - DNA, 576 bp, synthetic construct; identical to SEQ ID NO: 20732
  source 1..576: mol_type = other DNA

SEQ ID NO: 24072 - DNA, 617 bp, synthetic construct
  source 1..617: mol_type = other DNA
cggatgggtatcccaccatccgacccacagggtgtagtgctctggtattttgtacctttgcacgcctgttttcccattgtacccctccttaaattcctccccaagtaacgttagaagtttaaggaaaccaatgtacaataggaagcatcacatccagtggtgtaatgtacaagcacttctgtttccccggagcgaggtataagtggtacccaccgctgaaagcctttaaccgttatccgccaatcaactacgtaatggctagtattatcatgtttgtaatctggcgttcgatcaggtggttccccccactagtttggtcgatgaggctaggaactccccacgggcgaccgtgtcctagcctgcgtggcggccaacccagctcttgctgggacgcctttttatagacatggtgtgaagacctgcatgtgcttgattgtgagtcctccggcccctgaatgcggctaaccttaaccccggagccttgcagcataatccaatgttgttgaggtcgtaatgagtaattctgggacgggaccgactactttgggtgtccgtgtttccttttattctttatattgtcttatggtcacagcatatatagtatatatactgtgatc

SEQ ID NO: 24073 - DNA, 604 bp, synthetic construct; identical to SEQ ID NO: 20847
  source 1..604: mol_type = other DNA

SEQ ID NO: 24074 - DNA, 551 bp, synthetic construct
  source 1..551: mol_type = other DNA
gttttccctttgtacccgcccttaacttcctccctctgtaacgttagaagtttgtgaaattaaaggtacaataggaagcatcacatccagtggtgtttagtacaagcactcctgtctccccggagcgaggtataggttgtacccacgaccaaaagcctttaaccgttatccgccaatcaactacgtaacggctagtatcatcatgtttttgacttggtgttcgatcaggtggttccccccactagtctggtcgatgaggctaggaactcctcacgggtaaccgtgtcctagcctgcgtggcggccagcccagcttatgctgggacgcctttttaaagacatggtgtgaagacccgcatgtgcttgattgtgagtcctccggcccctgaatgcggctaaccctaaccccggagcccagcaacataatccaatgttgtttgggtcgtaatgagcaattctgggatgggaccgactactttgggtgtccgtgtttccttttattcttatattgtttcatggtcacagcatatatattacatatatactgtgatc

SEQ ID NO: 24075 - DNA, 586 bp, synthetic construct
  source 1..586: mol_type = other DNA
gtgtagtgctctggtattttgtacccttgcacgcctgtttcccatttgtacccttccttgatttcctacccctgtaacattagaagttttggaattttacagtacaataggaagcgccacatccagtggtgttgtgtacaagcacttctgtttacccggagcgaggtataggttgtacccacggccaaaaacctttaaccgttatccgccaaccaactacgtaacggctagtatcatcttgtacttgacttggtgttcgatcaggtggtatcccccactagtctggtcgatgaggctaggaattccccacgggcgaccgtgtcctagcctgcgtggcggccagcccagctttagctgggacgccttttcaaagacatggtgtgaagacctgcatgtgcttggttgtgagtcctccggcccctgaatgcggctaaccttaaccccggagcccagtgatataatccaatgttatttgggtcgtaatgagtaattccgggatgggaccgactactttgggtgtccgtgtttccttttattctttatattgtcttatggtcacagcatatatagtatatatactgtgatc

SEQ ID NO: 24076 - DNA, 626 bp, synthetic construct; identical to SEQ ID NO: 20727
  source 1..626: mol_type = other DNA

SEQ ID NO: 24077 - DNA, 743 bp, synthetic construct; identical to SEQ ID NO: 19369
  source 1..743: mol_type = other DNA

SEQ ID NO: 24078 - DNA, 742 bp, synthetic construct; identical to SEQ ID NO: 19566
  source 1..742: mol_type = other DNA

SEQ ID NO: 24079 - DNA, 725 bp, synthetic construct; identical to SEQ ID NO: 19919
  source 1..725: mol_type = other DNA

SEQ ID NO: 24080 - DNA, 677 bp, synthetic construct
  source 1..677: mol_type = other DNA
ggcgtagtactctggtatcacggtacctttgtacgcctattttactccccttccccccgtaacttagaagcattaactacaagttcaatagtaggactaccaaccaggtagttcaccgaacaagcacttctgtttacccggtcctagtacctgtgaagctgttcccacggcggaaggggaaaaagatcgttacccggctacctacttcgagaagcctagtaatgtcattgaaactcttgagcgttgcgttcagcacagtaccccctgtgtagctttggctgatgagtctgggcattccccactggcgacagtggcccaggctgcgttggcggccaaccggtccgggcaaccgggtcggacgcttatttgtggacatggtgtgaagagcctattgagctaggtagtagtcctccggcccctgaatgcggctaatcctaactccggagcaagtgcgcgcaatccagcgtgtaacttgtcgtaacgcgtaagtctggagcggaaccgactactttgggtgtccgtgtttcctgttttaccttatttggctgcttatggtgacaatctagtgttgttaccatatagcaattggattggccatccggtgaatttcttttgtgacgtttcttttgcggtatttataccaaactacacgtgtattatcagtttcaacttgtatc

SEQ ID NO: 24081 - DNA, 549 bp, synthetic construct; identical to SEQ ID NO: 3303
  source 1..549: mol_type = other DNA

SEQ ID NO: 24082 - DNA, 549 bp, synthetic construct; identical to SEQ ID NO: 3282
  source 1..549: mol_type = other DNA

SEQ ID NO: 24083 - DNA, 549 bp, synthetic construct; identical to SEQ ID NO: 3303
  source 1..549: mol_type = other DNA

SEQ ID NO: 24084 - DNA, 549 bp, synthetic construct; identical to SEQ ID NO: 3282
  source 1..549: mol_type = other DNA

SEQ ID NO: 24085 - DNA, 549 bp, synthetic construct; identical to SEQ ID NO: 3303
  source 1..549: mol_type = other DNA

SEQ ID NO: 24086 - DNA, 549 bp, synthetic construct; identical to SEQ ID NO: 3282
  source 1..549: mol_type = other DNA

SEQ ID NO: 24087 - DNA, 549 bp, synthetic construct; identical to SEQ ID NO: 3303
  source 1..549: mol_type = other DNA

SEQ ID NO: 24088 - DNA, 549 bp, synthetic construct; identical to SEQ ID NO: 3282
  source 1..549: mol_type = other DNA

SEQ ID NO: 24089 - DNA, 549 bp, synthetic construct; identical to SEQ ID NO: 3303
  source 1..549: mol_type = other DNA

SEQ ID NO: 24090 - DNA, 549 bp, synthetic construct; identical to SEQ ID NO: 3282
  source 1..549: mol_type = other DNA

SEQ ID NO: 24091 - DNA, 549 bp, synthetic construct; identical to SEQ ID NO: 3303
  source 1..549: mol_type = other DNA

SEQ ID NO: 24092 - DNA, 549 bp, synthetic construct; identical to SEQ ID NO: 3282
  source 1..549: mol_type = other DNA

SEQ ID NO: 24093 - DNA, 549 bp, synthetic construct; identical to SEQ ID NO: 3303
  source 1..549: mol_type = other DNA

SEQ ID NO: 24094 - DNA, 549 bp, synthetic construct; identical to SEQ ID NO: 3282
  source 1..549: mol_type = other DNA

SEQ ID NO: 24095 - DNA, 549 bp, synthetic construct; identical to SEQ ID NO: 3303
  source 1..549: mol_type = other DNA

SEQ ID NO: 24096 - DNA, 549 bp, synthetic construct; identical to SEQ ID NO: 3282
  source 1..549: mol_type = other DNA

SEQ ID NO: 24097 - DNA, 592 bp, synthetic construct; identical to SEQ ID NO: 31
  source 1..592: mol_type = other DNA

SEQ ID NO: 24098 - DNA, 612 bp, synthetic construct; identical to SEQ ID NO: 49
  source 1..612: mol_type = other DNA

SEQ ID NO: 24099 - DNA, 613 bp, synthetic construct; identical to SEQ ID NO: 50
  source 1..613: mol_type = other DNA

SEQ ID NO: 24100 - DNA, 613 bp, synthetic construct; identical to SEQ ID NO: 51
  source 1..613: mol_type = other DNA

SEQ ID NO: 24101 - DNA, 614 bp, synthetic construct; identical to SEQ ID NO: 55
  source 1..614: mol_type = other DNA

SEQ ID NO: 24102 - DNA, 621 bp, synthetic construct; identical to SEQ ID NO: 62
  source 1..621: mol_type = other DNA

SEQ ID NO: 24103 - DNA, 637 bp, synthetic construct; identical to SEQ ID NO: 70
  source 1..637: mol_type = other DNA

SEQ ID NO: 24104 - DNA, 647 bp, synthetic construct; identical to SEQ ID NO: 74
  source 1..647: mol_type = other DNA

SEQ ID NO: 24105 - DNA, 649 bp, synthetic construct; identical to SEQ ID NO: 76
  source 1..649: mol_type = other DNA

SEQ ID NO: 24106 - DNA, 651 bp, synthetic construct; identical to SEQ ID NO: 77
  source 1..651: mol_type = other DNA

SEQ ID NO: 24107 - DNA, 680 bp, synthetic construct; identical to SEQ ID NO: 90
  source 1..680: mol_type = other DNA

SEQ ID NO: 24108 - DNA, 697 bp, synthetic construct; identical to SEQ ID NO: 98
  source 1..697: mol_type = other DNA

SEQ ID NO: 24109 - DNA, 702 bp, synthetic construct; identical to SEQ ID NO: 100
  source 1..702: mol_type = other DNA

SEQ ID NO: 24110 - DNA, 705 bp, synthetic construct; identical to SEQ ID NO: 101
  source 1..705: mol_type = other DNA

SEQ ID NO: 24111 - DNA, 708 bp, synthetic construct; identical to SEQ ID NO: 106
  source 1..708: mol_type = other DNA

SEQ ID NO: 24112 - DNA, 708 bp, synthetic construct; identical to SEQ ID NO: 107
  source 1..708: mol_type = other DNA

SEQ ID NO: 24113 - DNA, 709 bp, synthetic construct; identical to SEQ ID NO: 108
  source 1..709: mol_type = other DNA

SEQ ID NO: 24114 - DNA, 709 bp, synthetic construct; identical to SEQ ID NO: 109
  source 1..709: mol_type = other DNA

SEQ ID NO: 24115 - DNA, 709 bp, synthetic construct; identical to SEQ ID NO: 112
  source 1..709: mol_type = other DNA

SEQ ID NO: 24116 - DNA, 743 bp, synthetic construct; identical to SEQ ID NO: 119
  source 1..743: mol_type = other DNA

SEQ ID NO: 24117 - DNA, 743 bp, synthetic construct; identical to SEQ ID NO: 120
  source 1..743: mol_type = other DNA

SEQ ID NO: 24118 - DNA, 744 bp, synthetic construct; identical to SEQ ID NO: 121
  source 1..744: mol_type = other DNA

SEQ ID NO: 24119 - DNA, 744 bp, synthetic construct; identical to SEQ ID NO: 122
  source 1..744: mol_type = other DNA

SEQ ID NO: 24120 - DNA, 746 bp, synthetic construct; identical to SEQ ID NO: 124
  source 1..746: mol_type = other DNA

SEQ ID NO: 24121 - DNA, 748 bp, synthetic construct; identical to SEQ ID NO: 125
  source 1..748: mol_type = other DNA

SEQ ID NO: 24122 - DNA, 751 bp, synthetic construct; identical to SEQ ID NO: 127
  source 1..751: mol_type = other DNA

SEQ ID NO: 24123 - DNA, 1000 bp, synthetic construct; identical to SEQ ID NO: 137
  source 1..1000: mol_type = other DNA

SEQ ID NO: 24124 - DNA, 1000 bp, synthetic construct; identical to SEQ ID NO: 138
  source 1..1000: mol_type = other DNA

SEQ ID NO: 24125 - DNA, 512 bp, synthetic construct; identical to SEQ ID NO: 535
  source 1..512: mol_type = other DNA

SEQ ID NO: 24126 - DNA, 512 bp, synthetic construct; identical to SEQ ID NO: 536
  source 1..512: mol_type = other DNA

SEQ ID NO: 24127 - DNA, 529 bp, synthetic construct; identical to SEQ ID NO: 559
  source 1..529: mol_type = other DNA

SEQ ID NO: 24128 - DNA, 535 bp, synthetic construct; identical to SEQ ID NO: 574
  source 1..535: mol_type = other DNA

SEQ ID NO: 24129 - DNA, 541 bp, synthetic construct; identical to SEQ ID NO: 580
  source 1..541: mol_type = other DNA

SEQ ID NO: 24130 - DNA, 541 bp, synthetic construct; identical to SEQ ID NO: 581
  source 1..541: mol_type = other DNA

SEQ ID NO: 24131 - DNA, 542 bp, synthetic construct; identical to SEQ ID NO: 583
  source 1..542: mol_type = other DNA

SEQ ID NO: 24132 - DNA, 553 bp, synthetic construct; identical to SEQ ID NO: 597
  source 1..553: mol_type = other DNA

SEQ ID NO: 24133 - DNA, 584 bp, synthetic construct; identical to SEQ ID NO: 636
  source 1..584: mol_type = other DNA

SEQ ID NO: 24134 - DNA, 596 bp, synthetic construct; identical to SEQ ID NO: 645
  source 1..596: mol_type = other DNA

SEQ ID NO: 24135 - DNA, 598 bp, synthetic construct; identical to SEQ ID NO: 648
  source 1..598: mol_type = other DNA

SEQ ID NO: 24136 - DNA, 602 bp, synthetic construct; identical to SEQ ID NO: 653
  source 1..602: mol_type = other DNA

SEQ ID NO: 24137 - DNA, 603 bp, synthetic construct; identical to SEQ ID NO: 654
  source 1..603: mol_type = other DNA

SEQ ID NO: 24138 - DNA, 605 bp, synthetic construct; identical to SEQ ID NO: 657
  source 1..605: mol_type = other DNA

SEQ ID NO: 24139 - DNA, 610 bp, synthetic construct; identical to SEQ ID NO: 665
  source 1..610: mol_type = other DNA

SEQ ID NO: 24140 - DNA, 612 bp, synthetic construct; identical to SEQ ID NO: 680
  source 1..612: mol_type = other DNA

SEQ ID NO: 24141 - DNA, 612 bp, synthetic construct; identical to SEQ ID NO: 684
  source 1..612: mol_type = other DNA

SEQ ID NO: 24142 - DNA, 612 bp, synthetic construct; identical to SEQ ID NO: 686
  source 1..612: mol_type = other DNA

SEQ ID NO: 24143 - DNA, 614 bp, synthetic construct; identical to SEQ ID NO: 690
  source 1..614: mol_type = other DNA

SEQ ID NO: 24144 - DNA, 614 bp, synthetic construct; identical to SEQ ID NO: 691
  source 1..614: mol_type = other DNA

SEQ ID NO: 24145 - DNA, 614 bp, synthetic construct; identical to SEQ ID NO: 692
  source 1..614: mol_type = other DNA

SEQ ID NO: 24146 - DNA, 615 bp, synthetic construct; identical to SEQ ID NO: 693
  source 1..615: mol_type = other DNA

SEQ ID NO: 24147 - DNA, 615 bp, synthetic construct; identical to SEQ ID NO: 695
  source 1..615: mol_type = other DNA

SEQ ID NO: 24148 - DNA, 615 bp, synthetic construct; identical to SEQ ID NO: 697
  source 1..615: mol_type = other DNA

SEQ ID NO: 24149 - DNA, 615 bp, synthetic construct; identical to SEQ ID NO: 699
  source 1..615: mol_type = other DNA

SEQ ID NO: 24150 - DNA, 615 bp, synthetic construct; identical to SEQ ID NO: 700
  source 1..615: mol_type = other DNA

SEQ ID NO: 24151 - DNA, 616 bp, synthetic construct; identical to SEQ ID NO: 701
  source 1..616: mol_type = other DNA

SEQ ID NO: 24152 - DNA, 616 bp, synthetic construct; identical to SEQ ID NO: 703
  source 1..616: mol_type = other DNA

SEQ ID NO: 24153 - DNA, 616 bp, synthetic construct; identical to SEQ ID NO: 704
  source 1..616: mol_type = other DNA

SEQ ID NO: 24154 - DNA, 616 bp, synthetic construct; identical to SEQ ID NO: 705
  source 1..616: mol_type = other DNA

SEQ ID NO: 24155 - DNA, 617 bp, synthetic construct; identical to SEQ ID NO: 707
  source 1..617: mol_type = other DNA

SEQ ID NO: 24156 - DNA, 617 bp, synthetic construct; identical to SEQ ID NO: 708
  source 1..617: mol_type = other DNA

SEQ ID NO: 24157 - DNA, 617 bp, synthetic construct; identical to SEQ ID NO: 710
  source 1..617: mol_type = other DNA

SEQ ID NO: 24158 - DNA, 618 bp, synthetic construct; identical to SEQ ID NO: 711
  source 1..618: mol_type = other DNA

SEQ ID NO: 24159 - DNA, 618 bp, synthetic construct; identical to SEQ ID NO: 713
  source 1..618: mol_type = other DNA

SEQ ID NO: 24160 - DNA, 618 bp, synthetic construct; identical to SEQ ID NO: 714
  source 1..618: mol_type = other DNA

SEQ ID NO: 24161 - DNA, 619 bp, synthetic construct; identical to SEQ ID NO: 718
  source 1..619: mol_type = other DNA

SEQ ID NO: 24162 - DNA, 620 bp, synthetic construct; identical to SEQ ID NO: 720
  source 1..620: mol_type = other DNA

SEQ ID NO: 24163 - DNA, 620 bp, synthetic construct; identical to SEQ ID NO: 721
  source 1..620: mol_type = other DNA

SEQ ID NO: 24164 - DNA, 620 bp, synthetic construct; identical to SEQ ID NO: 722
  source 1..620: mol_type = other DNA

SEQ ID NO: 24165 - DNA, 621 bp, synthetic construct; identical to SEQ ID NO: 724
  source 1..621: mol_type = other DNA

SEQ ID NO: 24166 - DNA, 622 bp, synthetic construct; identical to SEQ ID NO: 728
  source 1..622: mol_type = other DNA

SEQ ID NO: 24167 - DNA, 622 bp, synthetic construct; identical to SEQ ID NO: 729
  source 1..622: mol_type = other DNA

SEQ ID NO: 24168 - DNA, 623 bp, synthetic construct; identical to SEQ ID NO: 733
  source 1..623: mol_type = other DNA

SEQ ID NO: 24169 - DNA, 623 bp, synthetic construct; identical to SEQ ID NO: 734
  source 1..623: mol_type = other DNA

SEQ ID NO: 24170 - DNA, 624 bp, synthetic construct; identical to SEQ ID NO: 738
  source 1..624: mol_type = other DNA

SEQ ID NO: 24171 - DNA, 624 bp, synthetic construct; identical to SEQ ID NO: 739
  source 1..624: mol_type = other DNA

SEQ ID NO: 24172 - DNA, 625 bp, synthetic construct; identical to SEQ ID NO: 741
  source 1..625: mol_type = other DNA

SEQ ID NO: 24173 - DNA, 625 bp, synthetic construct; identical to SEQ ID NO: 743
  source 1..625: mol_type = other DNA

SEQ ID NO: 24174 - DNA, 625 bp, synthetic construct; identical to SEQ ID NO: 744
  source 1..625: mol_type = other DNA

SEQ ID NO: 24175 - DNA, 625 bp, synthetic construct; identical to SEQ ID NO: 746
  source 1..625: mol_type = other DNA

SEQ ID NO: 24176 - DNA, 626 bp, synthetic construct; identical to SEQ ID NO: 747
  source 1..626: mol_type = other DNA

SEQ ID NO: 24177 - DNA, 626 bp, synthetic construct; identical to SEQ ID NO: 748
  source 1..626: mol_type = other DNA

SEQ ID NO: 24178 - DNA, 626 bp, synthetic construct; identical to SEQ ID NO: 749
  source 1..626: mol_type = other DNA

SEQ ID NO: 24179 - DNA, 627 bp, synthetic construct; identical to SEQ ID NO: 751
  source 1..627: mol_type = other DNA

SEQ ID NO: 24180 - DNA, 627 bp, synthetic construct; identical to SEQ ID NO: 752
  source 1..627: mol_type = other DNA

SEQ ID NO: 24181 - DNA, 628 bp, synthetic construct; identical to SEQ ID NO: 753
  source 1..628: mol_type = other DNA

SEQ ID NO: 24182 - DNA, 630 bp, synthetic construct; identical to SEQ ID NO: 755
  source 1..630: mol_type = other DNA

SEQ ID NO: 24183 - DNA, 631 bp, synthetic construct; identical to SEQ ID NO: 756
  source 1..631: mol_type = other DNA

SEQ ID NO: 24184 - DNA, 633 bp, synthetic construct; identical to SEQ ID NO: 760
  source 1..633: mol_type = other DNA

SEQ ID NO: 24185 - DNA, 639 bp, synthetic construct; identical to SEQ ID NO: 767
  source 1..639: mol_type = other DNA

SEQ ID NO: 24186 - DNA, 641 bp, synthetic construct; identical to SEQ ID NO: 771
  source 1..641: mol_type = other DNA

SEQ ID NO: 24187 - DNA, 642 bp, synthetic construct; identical to SEQ ID NO: 773
  source 1..642: mol_type = other DNA

SEQ ID NO: 24188 - DNA, 643 bp, synthetic construct; identical to SEQ ID NO: 774
  source 1..643: mol_type = other DNA

SEQ ID NO: 24189 - DNA, 643 bp, synthetic construct; identical to SEQ ID NO: 776
  source 1..643: mol_type = other DNA

SEQ ID NO: 24190 - DNA, 647 bp, synthetic construct; identical to SEQ ID NO: 782
  source 1..647: mol_type = other DNA

SEQ ID NO: 24191 - DNA, 648 bp, synthetic construct; identical to SEQ ID NO: 783
  source 1..648: mol_type = other DNA

SEQ ID NO: 24192 - DNA, 648 bp, synthetic construct; identical to SEQ ID NO: 784
  source 1..648: mol_type = other DNA

SEQ ID NO: 24193 - DNA, 649 bp, synthetic construct; identical to SEQ ID NO: 785
  source 1..649: mol_type = other DNA

SEQ ID NO: 24194 - DNA, 651 bp, synthetic construct; identical to SEQ ID NO: 787
  source 1..651: mol_type = other DNA

SEQ ID NO: 24195 - DNA, 651 bp, synthetic construct; identical to SEQ ID NO: 788
  source 1..651: mol_type = other DNA

SEQ ID NO: 24196 - DNA, 654 bp, synthetic construct; identical to SEQ ID NO: 791
  source 1..654: mol_type = other DNA

SEQ ID NO: 24197 - DNA, 655 bp, synthetic construct; identical to SEQ ID NO: 792
  source 1..655: mol_type = other DNA

SEQ ID NO: 24198 - DNA, 655 bp, synthetic construct; identical to SEQ ID NO: 793
  source 1..655: mol_type = other DNA

SEQ ID NO: 24199 - DNA, 664 bp, synthetic construct; identical to SEQ ID NO: 802
  source 1..664: mol_type = other DNA

SEQ ID NO: 24200 - DNA, 666 bp, synthetic construct; identical to SEQ ID NO: 806
  source 1..666: mol_type = other DNA

SEQ ID NO: 24201 - DNA, 667 bp, synthetic construct; identical to SEQ ID NO: 808
  source 1..667: mol_type = other DNA

SEQ ID NO: 24202 - DNA, 672 bp, synthetic construct; identical to SEQ ID NO: 814
  source 1..672: mol_type = other DNA

SEQ ID NO: 24203 - DNA, 673 bp, synthetic construct; identical to SEQ ID NO: 816
  source 1..673: mol_type = other DNA

SEQ ID NO: 24204 - DNA, 675 bp, synthetic construct; identical to SEQ ID NO: 817
  source 1..675: mol_type = other DNA

SEQ ID NO: 24205 - DNA, 682 bp, synthetic construct; identical to SEQ ID NO: 819
  source 1..682: mol_type = other DNA

SEQ ID NO: 24206 - DNA, 683 bp, synthetic construct; identical to SEQ ID NO: 820
  source 1..683: mol_type = other DNA

SEQ ID NO: 24207 - DNA, 686 bp, synthetic construct; identical to SEQ ID NO: 823
  source 1..686: mol_type = other DNA

SEQ ID NO: 24208 - DNA, 689 bp, synthetic construct; identical to SEQ ID NO: 826
  source 1..689: mol_type = other DNA

SEQ ID NO: 24209 - DNA, 689 bp, synthetic construct; identical to SEQ ID NO: 827
  source 1..689: mol_type = other DNA

SEQ ID NO: 24210 - DNA, 693 bp, synthetic construct; identical to SEQ ID NO: 830
  source 1..693: mol_type = other DNA

SEQ ID NO: 24211 - DNA, 693 bp, synthetic construct; identical to SEQ ID NO: 831
  source 1..693: mol_type = other DNA

SEQ ID NO: 24212 - DNA, 694 bp, synthetic construct; identical to SEQ ID NO: 833
  source 1..694: mol_type = other DNA

SEQ ID NO: 24213 - DNA, 695 bp, synthetic construct; identical to SEQ ID NO: 834
  source 1..695: mol_type = other DNA

SEQ ID NO: 24214 - DNA, 697 bp, synthetic construct; identical to SEQ ID NO: 836
  source 1..697: mol_type = other DNA

SEQ ID NO: 24215 - DNA, 698 bp, synthetic construct; identical to SEQ ID NO: 839
  source 1..698: mol_type = other DNA

SEQ ID NO: 24216 - DNA, 698 bp, synthetic construct; identical to SEQ ID NO: 840
  source 1..698: mol_type = other DNA

SEQ ID NO: 24217 - DNA, 699 bp, synthetic construct; identical to SEQ ID NO: 841
  source 1..699: mol_type = other DNA

SEQ ID NO: 24218 - DNA, 699 bp, synthetic construct; identical to SEQ ID NO: 842
  source 1..699: mol_type = other DNA

SEQ ID NO: 24219 - DNA, 700 bp, synthetic construct; identical to SEQ ID NO: 843
  source 1..700: mol_type = other DNA

SEQ ID NO: 24220 - DNA, 702 bp, synthetic construct; identical to SEQ ID NO: 844
  source 1..702: mol_type = other DNA

SEQ ID NO: 24221 - DNA, 704 bp, synthetic construct; identical to SEQ ID NO: 846
  source 1..704: mol_type = other DNA

SEQ ID NO: 24222 - DNA, 704 bp, synthetic construct; identical to SEQ ID NO: 847
  source 1..704: mol_type = other DNA

SEQ ID NO: 24223 - DNA, 707 bp, synthetic construct; identical to SEQ ID NO: 849
  source 1..707: mol_type = other DNA

SEQ ID NO: 24224 - DNA, 707 bp, synthetic construct; identical to SEQ ID NO: 850
  source 1..707: mol_type = other DNA

SEQ ID NO: 24225 - DNA, 708 bp, synthetic construct; identical to SEQ ID NO: 851
  source 1..708: mol_type = other DNA

SEQ ID NO: 24226 - DNA, 708 bp, synthetic construct; identical to SEQ ID NO: 853
  source 1..708: mol_type = other DNA

SEQ ID NO: 24227 - DNA, 709 bp, synthetic construct; identical to SEQ ID NO: 855
  source 1..709: mol_type = other DNA

SEQ ID NO: 24228 - DNA, 710 bp, synthetic construct; identical to SEQ ID NO: 857
  source 1..710: mol_type = other DNA

SEQ ID NO: 24229 - DNA, 710 bp, synthetic construct; identical to SEQ ID NO: 858
  source 1..710: mol_type = other DNA

SEQ ID NO: 24230 - DNA, 711 bp, synthetic construct; identical to SEQ ID NO: 861
  source 1..711: mol_type = other DNA

SEQ ID NO: 24231 - DNA, 711 bp, synthetic construct; identical to SEQ ID NO: 862
  source 1..711: mol_type = other DNA

SEQ ID NO: 24232 - DNA, 711 bp, synthetic construct; identical to SEQ ID NO: 863
  source 1..711: mol_type = other DNA

SEQ ID NO: 24233 - DNA, 711 bp, synthetic construct; identical to SEQ ID NO: 864
  source 1..711: mol_type = other DNA

SEQ ID NO: 24234 - DNA, 711 bp, synthetic construct; identical to SEQ ID NO: 865
  source 1..711: mol_type = other DNA

SEQ ID NO: 24235 - DNA, 712 bp, synthetic construct; identical to SEQ ID NO: 867
  source 1..712: mol_type = other DNA

SEQ ID NO: 24236 - DNA, 712 bp, synthetic construct; identical to SEQ ID NO: 869
  source 1..712: mol_type = other DNA

SEQ ID NO: 24237 - DNA, 712 bp, synthetic construct; identical to SEQ ID NO: 870
  source 1..712: mol_type = other DNA

SEQ ID NO: 24238 - DNA, 713 bp, synthetic construct; identical to SEQ ID NO: 871
  source 1..713: mol_type = other DNA

SEQ ID NO: 24239 - DNA, 714 bp, synthetic construct; identical to SEQ ID NO: 875
  source 1..714: mol_type = other DNA

SEQ ID NO: 24240 - DNA, 714 bp, synthetic construct; identical to SEQ ID NO: 876
  source 1..714: mol_type = other DNA

SEQ ID NO: 24241 - DNA, 715 bp, synthetic construct; identical to SEQ ID NO: 884
  source 1..715: mol_type = other DNA

SEQ ID NO: 24242 - DNA, 715 bp, synthetic construct; identical to SEQ ID NO: 885
  source 1..715: mol_type = other DNA

SEQ ID NO: 24243 - DNA, 716 bp, synthetic construct; identical to SEQ ID NO: 888
  source 1..716: mol_type = other DNA

SEQ ID NO: 24244 - DNA, 716 bp, synthetic construct; identical to SEQ ID NO: 889
  source 1..716: mol_type = other DNA

SEQ ID NO: 24245 - DNA, 716 bp, synthetic construct; identical to SEQ ID NO: 890
  source 1..716: mol_type = other DNA

SEQ ID NO: 24246 - DNA, 717 bp, synthetic construct; identical to SEQ ID NO: 891
  source 1..717: mol_type = other DNA

SEQ ID NO: 24247 - DNA, 717 bp, synthetic construct; identical to SEQ ID NO: 892
  source 1..717: mol_type = other DNA

SEQ ID NO: 24248 - DNA, 719 bp, synthetic construct; identical to SEQ ID NO: 893
  source 1..719: mol_type = other DNA

SEQ ID NO: 24249 - DNA, 719 bp, synthetic construct; identical to SEQ ID NO: 894
  source 1..719: mol_type = other DNA

SEQ ID NO: 24250 - DNA, 721 bp, synthetic construct; identical to SEQ ID NO: 898
  source 1..721: mol_type = other DNA

SEQ ID NO: 24251 - DNA, 721 bp, synthetic construct; identical to SEQ ID NO: 899
  source 1..721: mol_type = other DNA

SEQ ID NO: 24252 - DNA, 722 bp, synthetic construct; identical to SEQ ID NO: 900
  source 1..722: mol_type = other DNA

SEQ ID NO: 24253 - DNA, 723 bp, synthetic construct; identical to SEQ ID NO: 902
  source 1..723: mol_type = other DNA

SEQ ID NO: 24254 - DNA, 723 bp, synthetic construct; identical to SEQ ID NO: 903
  source 1..723: mol_type = other DNA

SEQ ID NO: 24255 - DNA, 723 bp, synthetic construct; identical to SEQ ID NO: 904
  source 1..723: mol_type = other DNA

SEQ ID NO: 24256 - DNA, 723 bp, synthetic construct; identical to SEQ ID NO: 905
  source 1..723: mol_type = other DNA

SEQ ID NO: 24257 - DNA, 724 bp, synthetic construct; identical to SEQ ID NO: 906
  source 1..724: mol_type = other DNA

SEQ ID NO: 24258 - DNA, 724 bp, synthetic construct; identical to SEQ ID NO: 907
  source 1..724: mol_type = other DNA

SEQ ID NO: 24259 - DNA, 725 bp, synthetic construct; identical to SEQ ID NO: 910
  source 1..725: mol_type = other DNA

SEQ ID NO: 24260 - DNA, 725 bp, synthetic construct; identical to SEQ ID NO: 911
  source 1..725: mol_type = other DNA

SEQ ID NO: 24261 - DNA, 725 bp, synthetic construct; identical to SEQ ID NO: 912
  source 1..725: mol_type = other DNA

SEQ ID NO: 24262 - DNA, 725 bp, synthetic construct; identical to SEQ ID NO: 913
  source 1..725: mol_type = other DNA

SEQ ID NO: 24263 - DNA, 725 bp, synthetic construct; identical to SEQ ID NO: 914
  source 1..725: mol_type = other DNA

SEQ ID NO: 24264 - DNA, 725 bp, synthetic construct; identical to SEQ ID NO: 915
  source 1..725: mol_type = other DNA

SEQ ID NO: 24265 - DNA, 726 bp, synthetic construct; identical to SEQ ID NO: 916
  source 1..726: mol_type = other DNA

SEQ ID NO: 24266 - DNA, 726 bp, synthetic construct; identical to SEQ ID NO: 917
  source 1..726: mol_type = other DNA

SEQ ID NO: 24267 - DNA, 726 bp, synthetic construct; identical to SEQ ID NO: 918
  source 1..726: mol_type = other DNA

SEQ ID NO: 24268 - DNA, 726 bp, synthetic construct; identical to SEQ ID NO: 919
  source 1..726: mol_type = other DNA

SEQ ID NO: 24269 - DNA, 727 bp, synthetic construct; identical to SEQ ID NO: 920
  source 1..727: mol_type = other DNA

SEQ ID NO: 24270 - DNA, 728 bp, synthetic construct; identical to SEQ ID NO: 921
  source 1..728: mol_type = other DNA

SEQ ID NO: 24271 - DNA, 729 bp, synthetic construct; identical to SEQ ID NO: 922
  source 1..729: mol_type = other DNA

SEQ ID NO: 24272 - DNA, 729 bp, synthetic construct; identical to SEQ ID NO: 923
  source 1..729: mol_type = other DNA

SEQ ID NO: 24273 - DNA, 729 bp, synthetic construct; identical to SEQ ID NO: 924
  source 1..729: mol_type = other DNA

SEQ ID NO: 24274 - DNA, 729 bp, synthetic construct; identical to SEQ ID NO: 925
  source 1..729: mol_type = other DNA

SEQ ID NO: 24275 - DNA, 730 bp, synthetic construct; identical to SEQ ID NO: 927
  source 1..730: mol_type = other DNA

SEQ ID NO: 24276 - DNA, 730 bp, synthetic construct; identical to SEQ ID NO: 928
  source 1..730: mol_type = other DNA

SEQ ID NO: 24277 - DNA, 730 bp, synthetic construct; identical to SEQ ID NO: 929
  source 1..730: mol_type = other DNA

SEQ ID NO: 24278 - DNA, 731 bp, synthetic construct; identical to SEQ ID NO: 932
  source 1..731: mol_type = other DNA

SEQ ID NO: 24279 - DNA, 732 bp, synthetic construct; identical to SEQ ID NO: 934
  source 1..732: mol_type = other DNA

SEQ ID NO: 24280 - DNA, 732 bp, synthetic construct; identical to SEQ ID NO: 935
  source 1..732: mol_type = other DNA

SEQ ID NO: 24281 - DNA, 732 bp, synthetic construct; identical to SEQ ID NO: 936
  source 1..732: mol_type = other DNA

SEQ ID NO: 24282 - DNA, 733 bp, synthetic construct; identical to SEQ ID NO: 937
  source 1..733: mol_type = other DNA

SEQ ID NO: 24283 - DNA, 733 bp, synthetic construct; identical to SEQ ID NO: 938
  source 1..733: mol_type = other DNA

SEQ ID NO: 24284 - DNA, 733 bp, synthetic construct; identical to SEQ ID NO: 939
  source 1..733: mol_type = other DNA

SEQ ID NO: 24285 - DNA, 734 bp, synthetic construct; identical to SEQ ID NO: 942
  source 1..734: mol_type = other DNA

SEQ ID NO: 24286 - DNA, 734 bp, synthetic construct; identical to SEQ ID NO: 943
  source 1..734: mol_type = other DNA

SEQ ID NO: 24287 - DNA, 734 bp, synthetic construct; identical to SEQ ID NO: 945
  source 1..734: mol_type = other DNA

SEQ ID NO: 24288 - DNA, 734 bp, synthetic construct; identical to SEQ ID NO: 946
  source 1..734: mol_type = other DNA

SEQ ID NO: 24289 - DNA, 735 bp, synthetic construct; identical to SEQ ID NO: 947
  source 1..735: mol_type = other DNA

SEQ ID NO: 24290 - DNA, 735 bp, synthetic construct; identical to SEQ ID NO: 948
  source 1..735: mol_type = other DNA

SEQ ID NO: 24291 - DNA, 735 bp, synthetic construct; identical to SEQ ID NO: 949
  source 1..735: mol_type = other DNA

SEQ ID NO: 24292 - DNA, 735 bp, synthetic construct; identical to SEQ ID NO: 950
  source 1..735: mol_type = other DNA

SEQ ID NO: 24293 - DNA, 736 bp, synthetic construct; identical to SEQ ID NO: 951
  source 1..736: mol_type = other DNA

SEQ ID NO: 24294 - DNA, 736 bp, synthetic construct; identical to SEQ ID NO: 953
  source 1..736: mol_type = other DNA

SEQ ID NO: 24295 - DNA, 736 bp, synthetic construct; identical to SEQ ID NO: 954
  source 1..736: mol_type = other DNA

SEQ ID NO: 24296 - DNA, 737 bp, synthetic construct; identical to SEQ ID NO: 955
  source 1..737: mol_type = other DNA

SEQ ID NO: 24297 - DNA, 737 bp, synthetic construct; identical to SEQ ID NO: 956
  source 1..737: mol_type = other DNA

SEQ ID NO: 24298 - DNA, 737 bp, synthetic construct; identical to SEQ ID NO: 957
  source 1..737: mol_type = other DNA

SEQ ID NO: 24299 - DNA, 737 bp, synthetic construct; identical to SEQ ID NO: 958
  source 1..737: mol_type = other DNA

SEQ ID NO: 24300 - DNA, 737 bp, synthetic construct; identical to SEQ ID NO: 959
  source 1..737: mol_type = other DNA

SEQ ID NO: 24301 - DNA, 738 bp, synthetic construct; identical to SEQ ID NO: 960
  source 1..738: mol_type = other DNA

SEQ ID NO: 24302 - DNA, 738 bp, synthetic construct; identical to SEQ ID NO: 961
  source 1..738: mol_type = other DNA

SEQ ID NO: 24303 - DNA, 739 bp, synthetic construct; identical to SEQ ID NO: 962
  source 1..739: mol_type = other DNA

SEQ ID NO: 24304 - DNA, 739 bp, synthetic construct; identical to SEQ ID NO: 964
  source 1..739: mol_type = other DNA

SEQ ID NO: 24305 - DNA, 740 bp, synthetic construct; identical to SEQ ID NO: 965
  source 1..740: mol_type = other DNA

SEQ ID NO: 24306 - DNA, 740 bp, synthetic construct; identical to SEQ ID NO: 966
  source 1..740: mol_type = other DNA

SEQ ID NO: 24307 - DNA, 740 bp, synthetic construct; identical to SEQ ID NO: 967
  source 1..740: mol_type = other DNA

SEQ ID NO: 24308 - DNA, 741 bp, synthetic construct; identical to SEQ ID NO: 969
  source 1..741: mol_type = other DNA

SEQ ID NO: 24309 - DNA, 741 bp, synthetic construct; identical to SEQ ID NO: 970
  source 1..741: mol_type = other DNA

SEQ ID NO: 24310 - DNA, 741 bp, synthetic construct; identical to SEQ ID NO: 971
  source 1..741: mol_type = other DNA

SEQ ID NO: 24311 - DNA, 741 bp, synthetic construct; identical to SEQ ID NO: 972
  source 1..741: mol_type = other DNA

SEQ ID NO: 24312 - DNA, 741 bp, synthetic construct; identical to SEQ ID NO: 974
  source 1..741: mol_type = other DNA

SEQ ID NO: 24313 - DNA, 741 bp, synthetic construct; identical to SEQ ID NO: 975
  source 1..741: mol_type = other DNA

SEQ ID NO: 24314 - DNA, 741 bp, synthetic construct; identical to SEQ ID NO: 976
  source 1..741: mol_type = other DNA

SEQ ID NO: 24315 - DNA, 741 bp, synthetic construct; identical to SEQ ID NO: 977
  source 1..741: mol_type = other DNA

SEQ ID NO: 24316 - DNA, 741 bp, synthetic construct; identical to SEQ ID NO: 978
  source 1..741: mol_type = other DNA

SEQ ID NO: 24317 - DNA, 741 bp, synthetic construct; identical to SEQ ID NO: 979
  source 1..741: mol_type = other DNA

SEQ ID NO: 24318 - DNA, 741 bp, synthetic construct; identical to SEQ ID NO: 980
  source 1..741: mol_type = other DNA

SEQ ID NO: 24319 - DNA, 741 bp, synthetic construct; identical to SEQ ID NO: 981
  source 1..741: mol_type = other DNA

SEQ ID NO: 24320 - DNA, 741 bp, synthetic construct; identical to SEQ ID NO: 982
  source 1..741: mol_type = other DNA

SEQ ID NO: 24321 - DNA, 741 bp, synthetic construct; identical to SEQ ID NO: 983
  source 1..741: mol_type = other DNA

SEQ ID NO: 24322 - DNA, 741 bp, synthetic construct; identical to SEQ ID NO: 984
  source 1..741: mol_type = other DNA

SEQ ID NO: 24323 - DNA, 742 bp, synthetic construct; identical to SEQ ID NO: 985
  source 1..742: mol_type = other DNA

SEQ ID NO: 24324 - DNA, 742 bp, synthetic construct; identical to SEQ ID NO: 986
  source 1..742: mol_type = other DNA

SEQ ID NO: 24325 - DNA, 742 bp, synthetic construct; identical to SEQ ID NO: 987
  source 1..742: mol_type = other DNA

SEQ ID NO: 24326 - DNA, 742 bp, synthetic construct; identical to SEQ ID NO: 988
  source 1..742: mol_type = other DNA

SEQ ID NO: 24327 - DNA, 742 bp, synthetic construct; identical to SEQ ID NO: 989
  source 1..742: mol_type = other DNA

SEQ ID NO: 24328 - DNA, 742 bp, synthetic construct; identical to SEQ ID NO: 990
  source 1..742: mol_type = other DNA

SEQ ID NO: 24329 - DNA, 742 bp, synthetic construct; identical to SEQ ID NO: 991
  source 1..742: mol_type = other DNA

SEQ ID NO: 24330 - DNA, 742 bp, synthetic construct; identical to SEQ ID NO: 992
  source 1..742: mol_type = other DNA

SEQ ID NO: 24331 - DNA, 742 bp, synthetic construct; identical to SEQ ID NO: 993
  source 1..742: mol_type = other DNA

SEQ ID NO: 24332 - DNA, 742 bp, synthetic construct; identical to SEQ ID NO: 994
  source 1..742: mol_type = other DNA

SEQ ID NO: 24333 - DNA, 742 bp, synthetic construct; identical to SEQ ID NO: 995
  source 1..742: mol_type = other DNA

SEQ ID NO: 24334 - DNA, 742 bp, synthetic construct; identical to SEQ ID NO: 996
  source 1..742: mol_type = other DNA

SEQ ID NO: 24335 - DNA, 742 bp, synthetic construct; identical to SEQ ID NO: 997
  source 1..742: mol_type = other DNA

SEQ ID NO: 24336 - DNA, 742 bp, synthetic construct; identical to SEQ ID NO: 998
  source 1..742: mol_type = other DNA

SEQ ID NO: 24337 - DNA, 742 bp, synthetic construct; identical to SEQ ID NO: 999
  source 1..742: mol_type = other DNA

SEQ ID NO: 24338 - DNA, 742 bp, synthetic construct; identical to SEQ ID NO: 1000
  source 1..742: mol_type = other DNA

SEQ ID NO: 24339 - DNA, 742 bp, synthetic construct; identical to SEQ ID NO: 1001
  source 1..742: mol_type = other DNA

SEQ ID NO: 24340 - DNA, 742 bp, synthetic construct; identical to SEQ ID NO: 1002
  source 1..742: mol_type = other DNA

SEQ ID NO: 24341 - DNA, 742 bp, synthetic construct; identical to SEQ ID NO: 1003
  source 1..742: mol_type = other DNA

SEQ ID NO: 24342 - DNA, 742 bp, synthetic construct; identical to SEQ ID NO: 1004
  source 1..742: mol_type = other DNA

SEQ ID NO: 24343 - DNA, 742 bp, synthetic construct; identical to SEQ ID NO: 1005
  source 1..742: mol_type = other DNA

SEQ ID NO: 24344 - DNA, 742 bp, synthetic construct; identical to SEQ ID NO: 1006
  source 1..742: mol_type = other DNA

SEQ ID NO: 24345 - DNA, 742 bp, synthetic construct; identical to SEQ ID NO: 1007
  source 1..742: mol_type = other DNA

SEQ ID NO: 24346 - DNA, 742 bp, synthetic construct; identical to SEQ ID NO: 1008
  source 1..742: mol_type = other DNA

SEQ ID NO: 24347 - DNA, 742 bp, synthetic construct; identical to SEQ ID NO: 1009
  source 1..742: mol_type = other DNA

SEQ ID NO: 24348 - DNA, 742 bp, synthetic construct; identical to SEQ ID NO: 1010
  source 1..742: mol_type = other DNA

SEQ ID NO: 24349 - DNA, 742 bp, synthetic construct; identical to SEQ ID NO: 1011
  source 1..742: mol_type = other DNA

SEQ ID NO: 24350 - DNA, 742 bp, synthetic construct; identical to SEQ ID NO: 1012
  source 1..742: mol_type = other DNA

SEQ ID NO: 24351 - DNA, 742 bp, synthetic construct; identical to SEQ ID NO: 1014
  source 1..742: mol_type = other DNA

SEQ ID NO: 24352 - DNA, 742 bp, synthetic construct; identical to SEQ ID NO: 1015
  source 1..742: mol_type = other DNA

SEQ ID NO: 24353 - DNA, 742 bp, synthetic construct; identical to SEQ ID NO: 1016
  source 1..742: mol_type = other DNA

SEQ ID NO: 24354 - DNA, 742 bp, synthetic construct; identical to SEQ ID NO: 1017
  source 1..742: mol_type = other DNA

SEQ ID NO: 24355 - DNA, 742 bp, synthetic construct; identical to SEQ ID NO: 1018
  source 1..742: mol_type = other DNA

SEQ ID NO: 24356 - DNA, 742 bp, synthetic construct; identical to SEQ ID NO: 1019
  source 1..742: mol_type = other DNA

SEQ ID NO: 24357 - DNA, 742 bp, synthetic construct; identical to SEQ ID NO: 1020
  source 1..742: mol_type = other DNA

SEQ ID NO: 24358 - DNA, 742 bp, synthetic construct; identical to SEQ ID NO: 1021
  source 1..742: mol_type = other DNA

SEQ ID NO: 24359 - DNA, 742 bp, synthetic construct; identical to SEQ ID NO: 1023
  source 1..742: mol_type = other DNA

SEQ ID NO: 24360 - DNA, 743 bp, synthetic construct; identical to SEQ ID NO: 1024
  source 1..743: mol_type = other DNA

SEQ ID NO: 24361 - DNA, 743 bp, synthetic construct; identical to SEQ ID NO: 1025
  source 1..743: mol_type = other DNA

SEQ ID NO: 24362 - DNA, 743 bp, synthetic construct; identical to SEQ ID NO: 1026
  source 1..743: mol_type = other DNA

SEQ ID NO: 24363 - DNA, 743 bp, synthetic construct; identical to SEQ ID NO: 1027
  source 1..743: mol_type = other DNA

SEQ ID NO: 24364 - DNA, 743 bp, synthetic construct; identical to SEQ ID NO: 1028
  source 1..743: mol_type = other DNA

SEQ ID NO: 24365 - DNA, 743 bp, synthetic construct; identical to SEQ ID NO: 1029
  source 1..743: mol_type = other DNA

SEQ ID NO: 24366 - DNA, 743 bp, synthetic construct; identical to SEQ ID NO: 1030
  source 1..743: mol_type = other DNA

SEQ ID NO: 24367 - DNA, 743 bp, synthetic construct; identical to SEQ ID NO: 1031
  source 1..743: mol_type = other DNA

SEQ ID NO: 24368 - DNA, 743 bp, synthetic construct; identical to SEQ ID NO: 1032
  source 1..743: mol_type = other DNA

SEQ ID NO: 24369 - DNA, 743 bp, synthetic construct; identical to SEQ ID NO: 1033
  source 1..743: mol_type = other DNA

SEQ ID NO: 24370 - DNA, 743 bp, synthetic construct; identical to SEQ ID NO: 1035
  source 1..743: mol_type = other DNA

SEQ ID NO: 24371 - DNA, 743 bp, synthetic construct; identical to SEQ ID NO: 1036
  source 1..743: mol_type = other DNA

SEQ ID NO: 24372 - DNA, 743 bp, synthetic construct; identical to SEQ ID NO: 1037
  source 1..743: mol_type = other DNA

SEQ ID NO: 24373 - DNA, 743 bp, synthetic construct; identical to SEQ ID NO: 1038
  source 1..743: mol_type = other DNA

SEQ ID NO: 24374 - DNA, 743 bp, synthetic construct; identical to SEQ ID NO: 1039
  source 1..743: mol_type = other DNA

SEQ ID NO: 24375 - DNA, 743 bp, synthetic construct; identical to SEQ ID NO: 1040
  source 1..743: mol_type = other DNA

SEQ ID NO: 24376 - DNA, 743 bp, synthetic construct; identical to SEQ ID NO: 1041
  source 1..743: mol_type = other DNA

SEQ ID NO: 24377 - DNA, 743 bp, synthetic construct; identical to SEQ ID NO: 1042
  source 1..743: mol_type = other DNA

SEQ ID NO: 24378 - DNA, 743 bp, synthetic construct; identical to SEQ ID NO: 1044
  source 1..743: mol_type = other DNA

SEQ ID NO: 24379 - DNA, 743 bp, synthetic construct; identical to SEQ ID NO: 1045
  source 1..743: mol_type = other DNA

SEQ ID NO: 24380 - DNA, 743 bp, synthetic construct; identical to SEQ ID NO: 1047
  source 1..743: mol_type = other DNA

SEQ ID NO: 24381 - DNA, 743 bp, synthetic construct; identical to SEQ ID NO: 1048
  source 1..743: mol_type = other DNA

SEQ ID NO: 24382 - DNA, 743 bp, synthetic construct; identical to SEQ ID NO: 1051
  source 1..743: mol_type = other DNA

SEQ ID NO: 24383 - DNA, 743 bp, synthetic construct; identical to SEQ ID NO: 1054
  source 1..743: mol_type = other DNA

SEQ ID NO: 24384 - DNA, 743 bp, synthetic construct; identical to SEQ ID NO: 1055
  source 1..743: mol_type = other DNA

SEQ ID NO: 24385 - DNA, 743 bp, synthetic construct; identical to SEQ ID NO: 1056
  source 1..743: mol_type = other DNA

SEQ ID NO: 24386 - DNA, 743 bp, synthetic construct; identical to SEQ ID NO: 1057
  source 1..743: mol_type = other DNA

SEQ ID NO: 24387 - DNA, 743 bp, synthetic construct; identical to SEQ ID NO: 1058
  source 1..743: mol_type = other DNA

SEQ ID NO: 24388 - DNA, 744 bp, synthetic construct; identical to SEQ ID NO: 1059
  source 1..744: mol_type = other DNA

SEQ ID NO: 24389 - DNA, 744 bp, synthetic construct; identical to SEQ ID NO: 1060
  source 1..744: mol_type = other DNA

SEQ ID NO: 24390 - DNA, 744 bp, synthetic construct; identical to SEQ ID NO: 1061
  source 1..744: mol_type = other DNA

SEQ ID NO: 24391 - DNA, 744 bp, synthetic construct; identical to SEQ ID NO: 1062
  source 1..744: mol_type = other DNA

SEQ ID NO: 24392 - DNA, 744 bp, synthetic construct; identical to SEQ ID NO: 1063
  source 1..744: mol_type = other DNA

SEQ ID NO: 24393 - DNA, 744 bp, synthetic construct; identical to SEQ ID NO: 1064
  source 1..744: mol_type = other DNA

SEQ ID NO: 24394 - DNA, 744 bp, synthetic construct; identical to SEQ ID NO: 1065
  source 1..744: mol_type = other DNA

SEQ ID NO: 24395 - DNA, 744 bp, synthetic construct; identical to SEQ ID NO: 1066
  source 1..744: mol_type = other DNA

SEQ ID NO: 24396 - DNA, 744 bp, synthetic construct; identical to SEQ ID NO: 1067
  source 1..744: mol_type = other DNA

SEQ ID NO: 24397 - DNA, 744 bp, synthetic construct; identical to SEQ ID NO: 1068
  source 1..744: mol_type = other DNA

SEQ ID NO: 24398 - DNA, 744 bp, synthetic construct; identical to SEQ ID NO: 1069
  source 1..744: mol_type = other DNA

SEQ ID NO: 24399 - DNA, 744 bp, synthetic construct; identical to SEQ ID NO: 1072
  source 1..744: mol_type = other DNA

SEQ ID NO: 24400 - DNA, 744 bp, synthetic construct; identical to SEQ ID NO: 1073
  source 1..744: mol_type = other DNA

SEQ ID NO: 24401 - DNA, 744 bp, synthetic construct; identical to SEQ ID NO: 1074
  source 1..744: mol_type = other DNA

SEQ ID NO: 24402 - DNA, 744 bp, synthetic construct; identical to SEQ ID NO: 1076
  source 1..744: mol_type = other DNA

SEQ ID NO: 24403 - DNA, 744 bp, synthetic construct; identical to SEQ ID NO: 1077
  source 1..744: mol_type = other DNA

SEQ ID NO: 24404 - DNA, 744 bp, synthetic construct; identical to SEQ ID NO: 1078
  source 1..744: mol_type = other DNA

SEQ ID NO: 24405 - DNA, 744 bp, synthetic construct; identical to SEQ ID NO: 1079
  source 1..744: mol_type = other DNA

SEQ ID NO: 24406 - DNA, 744 bp, synthetic construct; identical to SEQ ID NO: 1081
  source 1..744: mol_type = other DNA

SEQ ID NO: 24407 - DNA, 744 bp, synthetic construct; identical to SEQ ID NO: 1082
  source 1..744: mol_type = other DNA

SEQ ID NO: 24408 - DNA, 744 bp, synthetic construct; identical to SEQ ID NO: 1084
  source 1..744: mol_type = other DNA

SEQ ID NO: 24409 - DNA, 744 bp, synthetic construct; identical to SEQ ID NO: 1085
  source 1..744: mol_type = other DNA

SEQ ID NO: 24410 - DNA, 745 bp, synthetic construct; identical to SEQ ID NO: 1086
  source 1..745: mol_type = other DNA

SEQ ID NO: 24411 - DNA, 745 bp, synthetic construct; identical to SEQ ID NO: 1087
  source 1..745: mol_type = other DNA

SEQ ID NO: 24412 - DNA, 745 bp, synthetic construct; identical to SEQ ID NO: 1091
  source 1..745: mol_type = other DNA

SEQ ID NO: 24413 - DNA, 745 bp, synthetic construct; identical to SEQ ID NO: 1092
  source 1..745: mol_type = other DNA

SEQ ID NO: 24414 - DNA, 745 bp, synthetic construct; identical to SEQ ID NO: 1094
  source 1..745: mol_type = other DNA

SEQ ID NO: 24415 - DNA, 745 bp, synthetic construct; identical to SEQ ID NO: 1095
  source 1..745: mol_type = other DNA

SEQ ID NO: 24416 - DNA, 745 bp, synthetic construct; identical to SEQ ID NO: 1096
  source 1..745: mol_type = other DNA

SEQ ID NO: 24417 - DNA, 745 bp, synthetic construct; identical to SEQ ID NO: 1097
  source 1..745: mol_type = other DNA

SEQ ID NO: 24418 - DNA, 745 bp, synthetic construct; identical to SEQ ID NO: 1098
  source 1..745: mol_type = other DNA

SEQ ID NO: 24419 - DNA, 745 bp, synthetic construct; identical to SEQ ID NO: 1099
  source 1..745: mol_type = other DNA

SEQ ID NO: 24420 - DNA, 745 bp, synthetic construct; identical to SEQ ID NO: 1100
  source 1..745: mol_type = other DNA

SEQ ID NO: 24421 - DNA, 745 bp, synthetic construct; identical to SEQ ID NO: 1101
  source 1..745: mol_type = other DNA

SEQ ID NO: 24422 - DNA, 745 bp, synthetic construct; identical to SEQ ID NO: 1102
  source 1..745: mol_type = other DNA

SEQ ID NO: 24423 - DNA, 745 bp, synthetic construct; identical to SEQ ID NO: 1103
  source 1..745: mol_type = other DNA

SEQ ID NO: 24424 - DNA, 745 bp, synthetic construct; identical to SEQ ID NO: 1106
  source 1..745: mol_type = other DNA

SEQ ID NO: 24425 - DNA, 745 bp, synthetic construct; identical to SEQ ID NO: 1107
  source 1..745: mol_type = other DNA

SEQ ID NO: 24426 - DNA, 745 bp, synthetic construct; identical to SEQ ID NO: 1108
  source 1..745: mol_type = other DNA

SEQ ID NO: 24427 - DNA, 745 bp, synthetic construct; identical to SEQ ID NO: 1110
  source 1..745: mol_type = other DNA

SEQ ID NO: 24428 - DNA, 745 bp, synthetic construct; identical to SEQ ID NO: 1111
  source 1..745: mol_type = other DNA

SEQ ID NO: 24429 - DNA, 745 bp, synthetic construct; identical to SEQ ID NO: 1112
  source 1..745: mol_type = other DNA

SEQ ID NO: 24430 - DNA, 745 bp, synthetic construct; identical to SEQ ID NO: 1113
  source 1..745: mol_type = other DNA

SEQ ID NO: 24431 - DNA, 745 bp, synthetic construct; identical to SEQ ID NO: 1114
  source 1..745: mol_type = other DNA

SEQ ID NO: 24432 - DNA, 746 bp, synthetic construct; identical to SEQ ID NO: 1119
  source 1..746: mol_type = other DNA

SEQ ID NO: 24433 - DNA, 746 bp, synthetic construct; identical to SEQ ID NO: 1121
  source 1..746: mol_type = other DNA

SEQ ID NO: 24434 - DNA, 746 bp, synthetic construct; identical to SEQ ID NO: 1123
  source 1..746: mol_type = other DNA

SEQ ID NO: 24435 - DNA, 746 bp, synthetic construct; identical to SEQ ID NO: 1124
  source 1..746: mol_type = other DNA

SEQ ID NO: 24436 - DNA, 746 bp, synthetic construct; identical to SEQ ID NO: 1125
  source 1..746: mol_type = other DNA

SEQ ID NO: 24437 - DNA, 746 bp, synthetic construct; identical to SEQ ID NO: 1126
  source 1..746: mol_type = other DNA

SEQ ID NO: 24438 - DNA, 746 bp, synthetic construct; identical to SEQ ID NO: 1127
  source 1..746: mol_type = other DNA

SEQ ID NO: 24439 - DNA, 746 bp, synthetic construct; identical to SEQ ID NO: 1130
  source 1..746: mol_type = other DNA

SEQ ID NO: 24440 - DNA, 746 bp, synthetic construct; identical to SEQ ID NO: 1131
  source 1..746: mol_type = other DNA

SEQ ID NO: 24441 - DNA, 746 bp, synthetic construct; identical to SEQ ID NO: 1132
  source 1..746: mol_type = other DNA

SEQ ID NO: 24442 - DNA, 746 bp, synthetic construct; identical to SEQ ID NO: 1134
  source 1..746: mol_type = other DNA

SEQ ID NO: 24443 - DNA, 746 bp, synthetic construct; identical to SEQ ID NO: 1135
  source 1..746: mol_type = other DNA

SEQ ID NO: 24444 - DNA, 746 bp, synthetic construct; identical to SEQ ID NO: 1136
  source 1..746: mol_type = other DNA

SEQ ID NO: 24445 - DNA, 746 bp, synthetic construct; identical to SEQ ID NO: 1138
  source 1..746: mol_type = other DNA

SEQ ID NO: 24446 - DNA, 746 bp, synthetic construct; identical to SEQ ID NO: 1139
  source 1..746: mol_type = other DNA

SEQ ID NO: 24447 - DNA, 746 bp, synthetic construct; identical to SEQ ID NO: 1140
  source 1..746: mol_type = other DNA

SEQ ID NO: 24448 - DNA, 746 bp, synthetic construct; identical to SEQ ID NO: 1142
  source 1..746: mol_type = other DNA

SEQ ID NO: 24449 - DNA, 747 bp, synthetic construct; identical to SEQ ID NO: 1146
  source 1..747: mol_type = other DNA

SEQ ID NO: 24450 - DNA, 747 bp, synthetic construct; identical to SEQ ID NO: 1147
  source 1..747: mol_type = other DNA

SEQ ID NO: 24451 - DNA, 747 bp, synthetic construct; identical to SEQ ID NO: 1148
  source 1..747: mol_type = other DNA

SEQ ID NO: 24452 - DNA, 747 bp, synthetic construct; identical to SEQ ID NO: 1149
  source 1..747: mol_type = other DNA

SEQ ID NO: 24453 - DNA, 747 bp, synthetic construct; identical to SEQ ID NO: 1150
  source 1..747: mol_type = other DNA

SEQ ID NO: 24454 - DNA, 747 bp, synthetic construct; identical to SEQ ID NO: 1151
  source 1..747: mol_type = other DNA

SEQ ID NO: 24455 - DNA, 747 bp, synthetic construct; identical to SEQ ID NO: 1153
  source 1..747: mol_type = other DNA

SEQ ID NO: 24456 - DNA, 747 bp, synthetic construct; identical to SEQ ID NO: 1154
  source 1..747: mol_type = other DNA

SEQ ID NO: 24457 - DNA, 747 bp, synthetic construct; identical to SEQ ID NO: 1155
  source 1..747: mol_type = other DNA

SEQ ID NO: 24458 - DNA, 747 bp, synthetic construct; identical to SEQ ID NO: 1156
  source 1..747: mol_type = other DNA

SEQ ID NO: 24459 - DNA, 747 bp, synthetic construct; identical to SEQ ID NO: 1159
  source 1..747: mol_type = other DNA

SEQ ID NO: 24460 - DNA, 747 bp, synthetic construct; identical to SEQ ID NO: 1160
  source 1..747: mol_type = other DNA

SEQ ID NO: 24461 - DNA, 747 bp, synthetic construct; identical to SEQ ID NO: 1162
  source 1..747: mol_type = other DNA

SEQ ID NO: 24462 - DNA, 747 bp, synthetic construct; identical to SEQ ID NO: 1163
  source 1..747: mol_type = other DNA

SEQ ID NO: 24463 - DNA, 747 bp, synthetic construct; identical to SEQ ID NO: 1164
  source 1..747: mol_type = other DNA

SEQ ID NO: 24464 - DNA, 747 bp, synthetic construct; identical to SEQ ID NO: 1165
  source 1..747: mol_type = other DNA

SEQ ID NO: 24465 - DNA, 747 bp, synthetic construct; identical to SEQ ID NO: 1167
  source 1..747: mol_type = other DNA

SEQ ID NO: 24466 - DNA, 747 bp, synthetic construct; identical to SEQ ID NO: 1168
  source 1..747: mol_type = other DNA

SEQ ID NO: 24467 - DNA, 747 bp, synthetic construct; identical to SEQ ID NO: 1169
  source 1..747: mol_type = other DNA

SEQ ID NO: 24468 - DNA, 747 bp, synthetic construct; identical to SEQ ID NO: 1171
  source 1..747: mol_type = other DNA

SEQ ID NO: 24469 - DNA, 747 bp, synthetic construct; identical to SEQ ID NO: 1172
  source 1..747: mol_type = other DNA

SEQ ID NO: 24470 - DNA, 747 bp, synthetic construct; identical to SEQ ID NO: 1173
  source 1..747: mol_type = other DNA

SEQ ID NO: 24471 - DNA, 747 bp, synthetic construct; identical to SEQ ID NO: 1174
  source 1..747: mol_type = other DNA

SEQ ID NO: 24472 - DNA, 748 bp, synthetic construct; identical to SEQ ID NO: 1175
  source 1..748: mol_type = other DNA

SEQ ID NO: 24473 - DNA, 748 bp, synthetic construct; identical to SEQ ID NO: 1176
  source 1..748: mol_type = other DNA

SEQ ID NO: 24474 - DNA, 748 bp, synthetic construct; identical to SEQ ID NO: 1177
  source 1..748: mol_type = other DNA

SEQ ID NO: 24475 - DNA, 748 bp, synthetic construct; identical to SEQ ID NO: 1178
  source 1..748: mol_type = other DNA

SEQ ID NO: 24476 - DNA, 748 bp, synthetic construct; identical to SEQ ID NO: 1179
  source 1..748: mol_type = other DNA

SEQ ID NO: 24477 - DNA, 748 bp, synthetic construct; identical to SEQ ID NO: 1180
  source 1..748: mol_type = other DNA

SEQ ID NO: 24478 - DNA, 748 bp, synthetic construct; identical to SEQ ID NO: 1182
  source 1..748: mol_type = other DNA

SEQ ID NO: 24479 - DNA, 748 bp, synthetic construct; identical to SEQ ID NO: 1183
  source 1..748: mol_type = other DNA

SEQ ID NO: 24480 - DNA, 748 bp, synthetic construct; identical to SEQ ID NO: 1184
  source 1..748: mol_type = other DNA

SEQ ID NO: 24481 - DNA, 748 bp, synthetic construct; identical to SEQ ID NO: 1185
  source 1..748: mol_type = other DNA

SEQ ID NO: 24482 - DNA, 748 bp, synthetic construct; identical to SEQ ID NO: 1186
  source 1..748: mol_type = other DNA

SEQ ID NO: 24483 - DNA, 748 bp, synthetic construct; identical to SEQ ID NO: 1187
  source 1..748: mol_type = other DNA

SEQ ID NO: 24484 - DNA, 748 bp, synthetic construct; identical to SEQ ID NO: 1188
  source 1..748: mol_type = other DNA

SEQ ID NO: 24485 - DNA, 748 bp, synthetic construct; identical to SEQ ID NO: 1189
  source 1..748: mol_type = other DNA

SEQ ID NO: 24486 - DNA, 749 bp, synthetic construct; identical to SEQ ID NO: 1192
  source 1..749: mol_type = other DNA

SEQ ID NO: 24487 - DNA, 749 bp, synthetic construct; identical to SEQ ID NO: 1193
  source 1..749: mol_type = other DNA

SEQ ID NO: 24488 - DNA, 749 bp, synthetic construct; identical to SEQ ID NO: 1194
  source 1..749: mol_type = other DNA

SEQ ID NO: 24489 - DNA, 749 bp, synthetic construct; identical to SEQ ID NO: 1195
  source 1..749: mol_type = other DNA

SEQ ID NO: 24490 - DNA, 749 bp, synthetic construct; identical to SEQ ID NO: 1196
  source 1..749: mol_type = other DNA

SEQ ID NO: 24491 - DNA, 749 bp, synthetic construct; identical to SEQ ID NO: 1197
  source 1..749: mol_type = other DNA

SEQ ID NO: 24492 - DNA, 749 bp, synthetic construct; identical to SEQ ID NO: 1198
  source 1..749: mol_type = other DNA

SEQ ID NO: 24493 - DNA, 749 bp, synthetic construct; identical to SEQ ID NO: 1199
  source 1..749: mol_type = other DNA

SEQ ID NO: 24494 - DNA, 749 bp, synthetic construct; identical to SEQ ID NO: 1200
  source 1..749: mol_type = other DNA

SEQ ID NO: 24495 - DNA, 750 bp, synthetic construct; identical to SEQ ID NO: 1206
  source 1..750: mol_type = other DNA

SEQ ID NO: 24496 - DNA, 753 bp, synthetic construct; identical to SEQ ID NO: 1209
  source 1..753: mol_type = other DNA

SEQ ID NO: 24497 - DNA, 753 bp, synthetic construct; identical to SEQ ID NO: 1210
  source 1..753: mol_type = other DNA

SEQ ID NO: 24498 - DNA, 753 bp, synthetic construct; identical to SEQ ID NO: 1211
  source 1..753: mol_type = other DNA

SEQ ID NO: 24499 - DNA, 753 bp, synthetic construct; identical to SEQ ID NO: 1213
  source 1..753: mol_type = other DNA

SEQ ID NO: 24500 - DNA, 754 bp, synthetic construct; identical to SEQ ID NO: 1214
  source 1..754: mol_type = other DNA

SEQ ID NO: 24501 - DNA, 754 bp, synthetic construct; identical to SEQ ID NO: 1215
  source 1..754: mol_type = other DNA

SEQ ID NO: 24502 - DNA, 754 bp, synthetic construct; identical to SEQ ID NO: 1216
  source 1..754: mol_type = other DNA

SEQ ID NO: 24503 - DNA, 754 bp, synthetic construct; identical to SEQ ID NO: 1217
  source 1..754: mol_type = other DNA

SEQ ID NO: 24504 - DNA, 755 bp, synthetic construct; identical to SEQ ID NO: 1218
  source 1..755: mol_type = other DNA

SEQ ID NO: 24505 - DNA, 755 bp, synthetic construct; identical to SEQ ID NO: 1219
  source 1..755: mol_type = other DNA

SEQ ID NO: 24506 - DNA, 758 bp, synthetic construct; identical to SEQ ID NO: 1220
  source 1..758: mol_type = other DNA

SEQ ID NO: 24507 - DNA, 758 bp, synthetic construct; identical to SEQ ID NO: 1221
  source 1..758: mol_type = other DNA

SEQ ID NO: 24508 - DNA, 759 bp, synthetic construct; identical to SEQ ID NO: 1223
  source 1..759: mol_type = other DNA

SEQ ID NO: 24509 - DNA, 762 bp, synthetic construct; identical to SEQ ID NO: 1226
  source 1..762: mol_type = other DNA

SEQ ID NO: 24510 - DNA, 766 bp, synthetic construct; identical to SEQ ID NO: 1227
  source 1..766: mol_type = other DNA

SEQ ID NO: 24511 - DNA, 769 bp, synthetic construct; identical to SEQ ID NO: 1229
  source 1..769: mol_type = other DNA

SEQ ID NO: 24512 - DNA, 770 bp, synthetic construct; identical to SEQ ID NO: 1230
  source 1..770: mol_type = other DNA

SEQ ID NO: 24513 - DNA, 773 bp, synthetic construct; identical to SEQ ID NO: 1233
  source 1..773: mol_type = other DNA

SEQ ID NO: 24514 - DNA, 774 bp, synthetic construct; identical to SEQ ID NO: 1234
  source 1..774: mol_type = other DNA

SEQ ID NO: 24515 - DNA, 787 bp, synthetic construct; identical to SEQ ID NO: 1240
  source 1..787: mol_type = other DNA

SEQ ID NO: 24516 - DNA, 798 bp, synthetic construct; identical to SEQ ID NO: 1242
  source 1..798: mol_type = other DNA

SEQ ID NO: 24517 - DNA, 798 bp, synthetic construct; identical to SEQ ID NO: 1243
  source 1..798: mol_type = other DNA

SEQ ID NO: 24518 - DNA, 800 bp, synthetic construct; identical to SEQ ID NO: 1244
  source 1..800: mol_type = other DNA

SEQ ID NO: 24519 - DNA, 801 bp, synthetic construct; identical to SEQ ID NO: 1245
  source 1..801: mol_type = other DNA

SEQ ID NO: 24520 - DNA, 803 bp, synthetic construct; identical to SEQ ID NO: 1246
  source 1..803: mol_type = other DNA

SEQ ID NO: 24521 - DNA, 804 bp, synthetic construct; identical to SEQ ID NO: 1247
  source 1..804: mol_type = other DNA

SEQ ID NO: 24522 - DNA, 808 bp, synthetic construct; identical to SEQ ID NO: 1248
  source 1..808: mol_type = other DNA

SEQ ID NO: 24523 - DNA, 809 bp, synthetic construct; identical to SEQ ID NO: 1249
  source 1..809: mol_type = other DNA

SEQ ID NO: 24524 - DNA, 809 bp, synthetic construct; identical to SEQ ID NO: 1250
  source 1..809: mol_type = other DNA

SEQ ID NO: 24525 - DNA, 812 bp, synthetic construct; identical to SEQ ID NO: 1252
  source 1..812: mol_type = other DNA

SEQ ID NO: 24526 - DNA, 813 bp, synthetic construct; identical to SEQ ID NO: 1253
  source 1..813: mol_type = other DNA

SEQ ID NO: 24527 - DNA, 814 bp, synthetic construct; identical to SEQ ID NO: 1254
  source 1..814: mol_type = other DNA

SEQ ID NO: 24528 - DNA, 814 bp, synthetic construct; identical to SEQ ID NO: 1255
  source 1..814: mol_type = other DNA

SEQ ID NO: 24529 - DNA, 814 bp, synthetic construct; identical to SEQ ID NO: 1256
  source 1..814: mol_type = other DNA

SEQ ID NO: 24530 - DNA, 814 bp, synthetic construct; identical to SEQ ID NO: 1257
  source 1..814: mol_type = other DNA

SEQ ID NO: 24531 - DNA, 815 bp, synthetic construct; identical to SEQ ID NO: 1258
  source 1..815: mol_type = other DNA

SEQ ID NO: 24532 - DNA, 816 bp, synthetic construct; identical to SEQ ID NO: 1259
  source 1..816: mol_type = other DNA

SEQ ID NO: 24533 - DNA, 816 bp, synthetic construct; identical to SEQ ID NO: 1260
  source 1..816: mol_type = other DNA

SEQ ID NO: 24534 - DNA, 816 bp, synthetic construct; identical to SEQ ID NO: 1261
  source 1..816: mol_type = other DNA

SEQ ID NO: 24535 - DNA, 817 bp, synthetic construct; identical to SEQ ID NO: 1263
  source 1..817: mol_type = other DNA

SEQ ID NO: 24536 - DNA, 818 bp, synthetic construct; identical to SEQ ID NO: 1264
  source 1..818: mol_type = other DNA

SEQ ID NO: 24537 - DNA, 818 bp, synthetic construct; identical to SEQ ID NO: 1265
  source 1..818: mol_type = other DNA

SEQ ID NO: 24538 - DNA, 818 bp, synthetic construct; identical to SEQ ID NO: 1266
  source 1..818: mol_type = other DNA

SEQ ID NO: 24539 - DNA, 819 bp, synthetic construct; identical to SEQ ID NO: 1267
  source 1..819: mol_type = other DNA

SEQ ID NO: 24540 - DNA, 819 bp, synthetic construct; identical to SEQ ID NO: 1268
  source 1..819: mol_type = other DNA

SEQ ID NO: 24541 - DNA, 819 bp, synthetic construct; identical to SEQ ID NO: 1269
  source 1..819: mol_type = other DNA

SEQ ID NO: 24542 - DNA, 820 bp, synthetic construct; identical to SEQ ID NO: 1271
  source 1..820: mol_type = other DNA

SEQ ID NO: 24543 - DNA, 820 bp, synthetic construct; identical to SEQ ID NO: 1272
  source 1..820: mol_type = other DNA

SEQ ID NO: 24544 - DNA, 820 bp, synthetic construct; identical to SEQ ID NO: 1273
  source 1..820: mol_type = other DNA

SEQ ID NO: 24545 - DNA, 821 bp, synthetic construct; identical to SEQ ID NO: 1275
  source 1..821: mol_type = other DNA

SEQ ID NO: 24546 - DNA, 822 bp, synthetic construct; identical to SEQ ID NO: 1276
  source 1..822: mol_type = other DNA

SEQ ID NO: 24547 - DNA, 822 bp, synthetic construct; identical to SEQ ID NO: 1278
  source 1..822: mol_type = other DNA

SEQ ID NO: 24548 - DNA, 822 bp, synthetic construct; identical to SEQ ID NO: 1279
  source 1..822: mol_type = other DNA

SEQ ID NO: 24549 - DNA, 822 bp, synthetic construct; identical to SEQ ID NO: 1280
  source 1..822: mol_type = other DNA

SEQ ID NO: 24550 - DNA, 823 bp, synthetic construct; identical to SEQ ID NO: 1282
  source 1..823: mol_type = other DNA

SEQ ID NO: 24551 - DNA, 830 bp, synthetic construct; identical to SEQ ID NO: 1284
  source 1..830: mol_type = other DNA

SEQ ID NO: 24552 - DNA, 837 bp, synthetic construct; identical to SEQ ID NO: 1285
  source 1..837: mol_type = other DNA

SEQ ID NO: 24553 - DNA, 847 bp, synthetic construct; identical to SEQ ID NO: 1287
  source 1..847: mol_type = other DNA

SEQ ID NO: 24554 - DNA, 867 bp, synthetic construct; identical to SEQ ID NO: 1288
  source 1..867: mol_type = other DNA

SEQ ID NO: 24555 - DNA, 1000 bp, synthetic construct; identical to SEQ ID NO: 1460
  source 1..1000: mol_type = other DNA

SEQ ID NO: 24556 - DNA, 1000 bp, synthetic construct; identical to SEQ ID NO: 1463
  source 1..1000: mol_type = other DNA

SEQ ID NO: 24557 - DNA, 678 bp, synthetic construct; identical to SEQ ID NO: 2285
  source 1..678: mol_type = other DNA

SEQ ID NO: 24558 - DNA, 728 bp, synthetic construct; identical to SEQ ID NO: 2344
  source 1..728: mol_type = other DNA

SEQ ID NO: 24559 - DNA, 731 bp, synthetic construct; identical to SEQ ID NO: 2346
  source 1..731: mol_type = other DNA

SEQ ID NO: 24560 - DNA, 789 bp, synthetic construct; identical to SEQ ID NO: 2422
  source 1..789: mol_type = other DNA

SEQ ID NO: 24561 - DNA, 801 bp, synthetic construct; identical to SEQ ID NO: 2435
  source 1..801: mol_type = other DNA

SEQ ID NO: 24562 - DNA, 832 bp, synthetic construct; identical to SEQ ID NO: 2465
  source 1..832: mol_type = other DNA

SEQ ID NO: 24563 - DNA, 723 bp, synthetic construct; identical to SEQ ID NO: 1303
  source 1..723: mol_type = other DNA

SEQ ID NO: 24564 - DNA, 712 bp, synthetic construct; identical to SEQ ID NO: 1304
  source 1..712: mol_type = other DNA

SEQ ID NO: 24565 - DNA, 677 bp, synthetic construct; identical to SEQ ID NO: 1313
  source 1..677: mol_type = other DNA

SEQ ID NO: 24566 - DNA, 629 bp, synthetic construct; identical to SEQ ID NO: 1317
  source 1..629: mol_type = other DNA

SEQ ID NO: 24567 - DNA, 725 bp, synthetic construct; identical to SEQ ID NO: 1330
  source 1..725: mol_type = other DNA

SEQ ID NO: 24568 - DNA, 610 bp, synthetic construct; identical to SEQ ID NO: 665
  source 1..610: mol_type = other DNA

SEQ ID NO: 24569 - DNA, 711 bp, synthetic construct; identical to SEQ ID NO: 1342
  source 1..711: mol_type = other DNA

SEQ ID NO: 24570 - DNA, 713 bp, synthetic construct; identical to SEQ ID NO: 871
  source 1..713: mol_type = other DNA

SEQ ID NO: 24571 - DNA, 712 bp, synthetic construct; identical to SEQ ID NO: 867
  source 1..712: mol_type = other DNA

SEQ ID NO: 24572 - DNA, 711 bp, synthetic construct; identical to SEQ ID NO: 1346
  source 1..711: mol_type = other DNA

SEQ ID NO: 24573 - DNA, 646 bp, synthetic construct; identical to SEQ ID NO: 1347
  source 1..646: mol_type = other DNA

SEQ ID NO: 24574 - DNA, 601 bp, synthetic construct; identical to SEQ ID NO: 1353
  source 1..601: mol_type = other DNA

SEQ ID NO: 24575 - DNA, 601 bp, synthetic construct; identical to SEQ ID NO: 1354
  source 1..601: mol_type = other DNA

SEQ ID NO: 24576 - DNA, 612 bp, synthetic construct; identical to SEQ ID NO: 680
  source 1..612: mol_type = other DNA

SEQ ID NO: 24577 - DNA, 766 bp, synthetic construct; identical to SEQ ID NO: 1227
  source 1..766: mol_type = other DNA

SEQ ID NO: 24578 - DNA, 709 bp, synthetic construct; identical to SEQ ID NO: 1360
  source 1..709: mol_type = other DNA

SEQ ID NO: 24579 - DNA, 650 bp, synthetic construct; identical to SEQ ID NO: 1364
  source 1..650: mol_type = other DNA

SEQ ID NO: 24580 - DNA, 730 bp, synthetic construct; identical to SEQ ID NO: 1370
  source 1..730: mol_type = other DNA

SEQ ID NO: 24581 - DNA, 752 bp, synthetic construct; identical to SEQ ID NO: 128
  source 1..752: mol_type = other DNA

SEQ ID NO: 24582 - DNA, 653 bp, synthetic construct; identical to SEQ ID NO: 3285
  source 1..653: mol_type = other DNA

SEQ ID NO: 24583 - DNA, 661 bp, synthetic construct; identical to SEQ ID NO: 1406
  source 1..661: mol_type = other DNA

SEQ ID NO: 24584 - DNA, 625 bp, synthetic construct; identical to SEQ ID NO: 3283
  source 1..625: mol_type = other DNA

SEQ ID NO: 24585 - DNA, 630 bp, synthetic construct; identical to SEQ ID NO: 3284
  source 1..630: mol_type = other DNA

SEQ ID NO: 24586 - DNA, 665 bp, synthetic construct; identical to SEQ ID NO: 1432
  source 1..665: mol_type = other DNA

SEQ ID NO: 24587 - DNA, 787 bp, synthetic construct; identical to SEQ ID NO: 1438
  source 1..787: mol_type = other DNA

SEQ ID NO: 24588 - DNA, 770 bp, synthetic construct; identical to SEQ ID NO: 1230
  source 1..770: mol_type = other DNA

SEQ ID NO: 24589 - DNA, 545 bp, synthetic construct; identical to SEQ ID NO: 1440
  source 1..545: mol_type = other DNA

SEQ ID NO: 24590 - DNA, 782 bp, synthetic construct; identical to SEQ ID NO: 1441
  source 1..782: mol_type = other DNA

SEQ ID NO: 24591 - DNA, 1000 bp, synthetic construct; identical to SEQ ID NO: 138
  source 1..1000: mol_type = other DNA

SEQ ID NO: 24592 - DNA, 729 bp, synthetic construct; identical to SEQ ID NO: 922
  source 1..729: mol_type = other DNA

SEQ ID NO: 24593 - DNA, 755 bp, synthetic construct; identical to SEQ ID NO: 1218
  source 1..755: mol_type = other DNA

SEQ ID NO: 24594 - DNA, 744 bp, synthetic construct; identical to SEQ ID NO: 121
  source 1..744: mol_type = other DNA

SEQ ID NO: 24595 - DNA, 743 bp, synthetic construct; identical to SEQ ID NO: 119
  source 1..743: mol_type = other DNA

SEQ ID NO: 24596 - DNA, 746 bp, synthetic construct; identical to SEQ ID NO: 124
  source 1..746: mol_type = other DNA

SEQ ID NO: 24597 - DNA, 743 bp, synthetic construct; identical to SEQ ID NO: 120
  source 1..743: mol_type = other DNA

SEQ ID NO: 24598 - DNA, 1000 bp, synthetic construct; identical to SEQ ID NO: 138
  source 1..1000: mol_type = other DNA

SEQ ID NO: 24599 - DNA, 655 bp, synthetic construct; identical to SEQ ID NO: 793
  source 1..655: mol_type = other DNA

SEQ ID NO: 24600 - DNA, 730 bp, synthetic construct; identical to SEQ ID NO: 927
  source 1..730: mol_type = other DNA

SEQ ID NO: 24601 - DNA, 598 bp, synthetic construct; identical to SEQ ID NO: 648
  source 1..598: mol_type = other DNA

SEQ ID NO: 24602 - DNA, 664 bp, synthetic construct; identical to SEQ ID NO: 802
  source 1..664: mol_type = other DNA

SEQ ID NO: 24603 - DNA, 716 bp, synthetic construct; identical to SEQ ID NO: 889
  source 1..716: mol_type = other DNA

SEQ ID NO: 24604 - DNA, 747 bp, synthetic construct; identical to SEQ ID NO: 1174
  source 1..747: mol_type = other DNA

SEQ ID NO: 24605 - DNA, 744 bp, synthetic construct; identical to SEQ ID NO: 1061
  source 1..744: mol_type = other DNA

SEQ ID NO: 24606 - DNA, 745 bp, synthetic construct; identical to SEQ ID NO: 1112
  source 1..745: mol_type = other DNA

SEQ ID NO: 24607 - DNA, 742 bp, synthetic construct; identical to SEQ ID NO: 996
  source 1..742: mol_type = other DNA

SEQ ID NO: 24608 - DNA, 742 bp, synthetic construct; identical to SEQ ID NO: 1015
  source 1..742: mol_type = other DNA

SEQ ID NO: 24609 - DNA, 741 bp, synthetic construct; identical to SEQ ID NO: 983
  source 1..741: mol_type = other DNA

SEQ ID NO: 24610 - DNA, 742 bp, synthetic construct; identical to SEQ ID NO: 1002
  source 1..742: mol_type = other DNA

SEQ ID NO: 24611 - DNA, 742 bp, synthetic construct; identical to SEQ ID NO: 1018
  source 1..742: mol_type = other DNA

SEQ ID NO: 24612 - DNA, 743 bp, synthetic construct; identical to SEQ ID NO: 1045
  source 1..743: mol_type = other DNA

SEQ ID NO: 24613 - DNA, 743 bp, synthetic construct; identical to SEQ ID NO: 1038
  source 1..743: mol_type = other DNA

SEQ ID NO: 24614 - DNA, 742 bp, synthetic construct; identical to SEQ ID NO: 1004
  source 1..742: mol_type = other DNA

SEQ ID NO: 24615 - DNA, 743 bp, synthetic construct; identical to SEQ ID NO: 1058
  source 1..743: mol_type = other DNA

SEQ ID NO: 24616 - DNA, 744 bp, synthetic construct; identical to SEQ ID NO: 1081
  source 1..744: mol_type = other DNA

SEQ ID NO: 24617 - DNA, 743 bp, synthetic construct; identical to SEQ ID NO: 1036
  source 1..743: mol_type = other DNA

SEQ ID NO: 24618 - DNA, 742 bp, synthetic construct; identical to SEQ ID NO: 987
  source 1..742: mol_type = other DNA

SEQ ID NO: 24619 - DNA, 742 bp, synthetic construct; identical to SEQ ID NO: 1019
  source 1..742: mol_type = other DNA

SEQ ID NO: 24620 - DNA, 742 bp, synthetic construct; identical to SEQ ID NO: 1001
  source 1..742: mol_type = other DNA

SEQ ID NO: 24621 - DNA, 740 bp, synthetic construct; identical to SEQ ID NO: 967
  source 1..740: mol_type = other DNA

SEQ ID NO: 24622 - DNA, 741 bp, synthetic construct; identical to SEQ ID NO: 970
  source 1..741: mol_type = other DNA

SEQ ID NO: 24623 - DNA, 743 bp, synthetic construct; identical to SEQ ID NO: 1039
  source 1..743: mol_type = other DNA

SEQ ID NO: 24624 - DNA, 742 bp, synthetic construct; identical to SEQ ID NO: 989
  source 1..742: mol_type = other DNA

SEQ ID NO: 24625 - DNA, 733 bp, synthetic construct; identical to SEQ ID NO: 938
  source 1..733: mol_type = other DNA

SEQ ID NO: 24626 - DNA, 749 bp, synthetic construct; identical to SEQ ID NO: 1194
  source 1..749: mol_type = other DNA

SEQ ID NO: 24627 - DNA, 742 bp, synthetic construct; identical to SEQ ID NO: 1000
  source 1..742: mol_type = other DNA

SEQ ID NO: 24628 - DNA, 743 bp, synthetic construct; identical to SEQ ID NO: 1025
  source 1..743: mol_type = other DNA

SEQ ID NO: 24629 - DNA, 746 bp, synthetic construct; identical to SEQ ID NO: 1142
  source 1..746: mol_type = other DNA

SEQ ID NO: 24630 - DNA, 743 bp, synthetic construct; identical to SEQ ID NO: 1028
  source 1..743: mol_type = other DNA

SEQ ID NO: 24631 - DNA, 742 bp, synthetic construct; identical to SEQ ID NO: 1017
  source 1..742: mol_type = other DNA

SEQ ID NO: 24632 - DNA, 753 bp, synthetic construct; identical to SEQ ID NO: 1213
  source 1..753: mol_type = other DNA

SEQ ID NO: 24633 - DNA, 746 bp, synthetic construct; identical to SEQ ID NO: 1140
  source 1..746: mol_type = other DNA

SEQ ID NO: 24634 - DNA, 745 bp, synthetic construct; identical to SEQ ID NO: 1096
  source 1..745: mol_type = other DNA

SEQ ID NO: 24635 - DNA, 747 bp, synthetic construct; identical to SEQ ID NO: 1168
  source 1..747: mol_type = other DNA

SEQ ID NO: 24636 - DNA, 732 bp, synthetic construct; identical to SEQ ID NO: 934
  source 1..732: mol_type = other DNA

SEQ ID NO: 24637 - DNA, 749 bp, synthetic construct; identical to SEQ ID NO: 1198
  source 1..749: mol_type = other DNA

SEQ ID NO: 24638 - DNA, 747 bp, synthetic construct; identical to SEQ ID NO: 1154
  source 1..747: mol_type = other DNA

SEQ ID NO: 24639 - DNA, 749 bp, synthetic construct; identical to SEQ ID NO: 1200
  source 1..749: mol_type = other DNA

SEQ ID NO: 24640 - DNA, 747 bp, synthetic construct; identical to SEQ ID NO: 1155
  source 1..747: mol_type = other DNA

SEQ ID NO: 24641 - DNA, 748 bp, synthetic construct; identical to SEQ ID NO: 1180
  source 1..748: mol_type = other DNA

SEQ ID NO: 24642 - DNA, 746 bp, synthetic construct; identical to SEQ ID NO: 1138
  source 1..746: mol_type = other DNA

SEQ ID NO: 24643 - DNA, 746 bp, synthetic construct; identical to SEQ ID NO: 1136
  source 1..746: mol_type = other DNA

SEQ ID NO: 24644 - DNA, 744 bp, synthetic construct; identical to SEQ ID NO: 1067
  source 1..744: mol_type = other DNA

SEQ ID NO: 24645 - DNA, 750 bp, synthetic construct; identical to SEQ ID NO: 1206
  source 1..750: mol_type = other DNA

SEQ ID NO: 24646 - DNA, 746 bp, synthetic construct; identical to SEQ ID NO: 1131
  source 1..746: mol_type = other DNA

SEQ ID NO: 24647 - DNA, 747 bp, synthetic construct; identical to SEQ ID NO: 1162
  source 1..747: mol_type = other DNA

SEQ ID NO: 24648 - DNA, 714 bp, synthetic construct; identical to SEQ ID NO: 876
  source 1..714: mol_type = other DNA

SEQ ID NO: 24649 - DNA, 726 bp, synthetic construct; identical to SEQ ID NO: 917
  source 1..726: mol_type = other DNA

SEQ ID NO: 24650 - DNA, 749 bp, synthetic construct; identical to SEQ ID NO: 1199
  source 1..749: mol_type = other DNA

SEQ ID NO: 24651 - DNA, 747 bp, synthetic construct; identical to SEQ ID NO: 1172
  source 1..747: mol_type = other DNA

SEQ ID NO: 24652 - DNA, 734 bp, synthetic construct; identical to SEQ ID NO: 943
  source 1..734: mol_type = other DNA

SEQ ID NO: 24653 - DNA, 746 bp, synthetic construct; identical to SEQ ID NO: 1139
  source 1..746: mol_type = other DNA

SEQ ID NO: 24654 - DNA, 744 bp, synthetic construct; identical to SEQ ID NO: 1066
  source 1..744: mol_type = other DNA

SEQ ID NO: 24655 - DNA, 748 bp, synthetic construct; identical to SEQ ID NO: 1185
  source 1..748: mol_type = other DNA

SEQ ID NO: 24656 - DNA, 747 bp, synthetic construct; identical to SEQ ID NO: 1169
  source 1..747: mol_type = other DNA

SEQ ID NO: 24657 - DNA, 726 bp, synthetic construct; identical to SEQ ID NO: 918
  source 1..726: mol_type = other DNA

SEQ ID NO: 24658 - DNA, 712 bp, synthetic construct; identical to SEQ ID NO: 870
  source 1..712: mol_type = other DNA

SEQ ID NO: 24659 - DNA, 754 bp, synthetic construct; identical to SEQ ID NO: 1216
  source 1..754: mol_type = other DNA

SEQ ID NO: 24660 - DNA, 747 bp, synthetic construct; identical to SEQ ID NO: 1156
  source 1..747: mol_type = other DNA

SEQ ID NO: 24661 - DNA, 748 bp, synthetic construct; identical to SEQ ID NO: 1188
  source 1..748: mol_type = other DNA

SEQ ID NO: 24662 - DNA, 754 bp, synthetic construct; identical to SEQ ID NO: 1217
  source 1..754: mol_type = other DNA

SEQ ID NO: 24663 - DNA, 746 bp, synthetic construct; identical to SEQ ID NO: 1132
  source 1..746: mol_type = other DNA

SEQ ID NO: 24664 - DNA, 745 bp, synthetic construct; identical to SEQ ID NO: 1095
  source 1..745: mol_type = other DNA

SEQ ID NO: 24665 - DNA, 748 bp, synthetic construct; identical to SEQ ID NO: 1187
  source 1..748: mol_type = other DNA

SEQ ID NO: 24666 - DNA, 744 bp, synthetic construct; identical to SEQ ID NO: 1065
  source 1..744: mol_type = other DNA

SEQ ID NO: 24667 - DNA, 699 bp, synthetic construct; identical to SEQ ID NO: 842
  source 1..699: mol_type = other DNA

SEQ ID NO: 24668 - DNA, 745 bp, synthetic construct; identical to SEQ ID NO: 1101
  source 1..745: mol_type = other DNA

SEQ ID NO: 24669 - DNA, 749 bp, synthetic construct; identical to SEQ ID NO: 1196
  source 1..749: mol_type = other DNA

SEQ ID NO: 24670 - DNA, 749 bp, synthetic construct; identical to SEQ ID NO: 1197
  source 1..749: mol_type = other DNA

SEQ ID NO: 24671 - DNA, 743 bp, synthetic construct; identical to SEQ ID NO: 1035
  source 1..743: mol_type = other DNA

SEQ ID NO: 24672 - DNA, 747 bp, synthetic construct; identical to SEQ ID NO: 1163
  source 1..747: mol_type = other DNA

SEQ ID NO: 24673 - DNA, 738 bp, synthetic construct; identical to SEQ ID NO: 960
  source 1..738: mol_type = other DNA

SEQ ID NO: 24674 - DNA, 737 bp, synthetic construct; identical to SEQ ID NO: 957
  source 1..737: mol_type = other DNA

SEQ ID NO: 24675 - DNA, 744 bp, synthetic construct; identical to SEQ ID NO: 1078
  source 1..744: mol_type = other DNA

SEQ ID NO: 24676 - DNA, 742 bp, synthetic construct; identical to SEQ ID NO: 993
  source 1..742: mol_type = other DNA

SEQ ID NO: 24677 - DNA, 748 bp, synthetic construct; identical to SEQ ID NO: 1182
  source 1..748: mol_type = other DNA

SEQ ID NO: 24678 - DNA, 748 bp, synthetic construct; identical to SEQ ID NO: 1177
  source 1..748: mol_type = other DNA

SEQ ID NO: 24679 - DNA, 724 bp, synthetic construct; identical to SEQ ID NO: 907
  source 1..724: mol_type = other DNA

SEQ ID NO: 24680 - DNA, 748 bp, synthetic construct; identical to SEQ ID NO: 1186
  source 1..748: mol_type = other DNA

SEQ ID NO: 24681 - DNA, 747 bp, synthetic construct; identical to SEQ ID NO: 1164
  source 1..747: mol_type = other DNA

SEQ ID NO: 24682 - DNA, 748 bp, synthetic construct; identical to SEQ ID NO: 1183
  source 1..748: mol_type = other DNA

SEQ ID NO: 24683 - DNA, 746 bp, synthetic construct; identical to SEQ ID NO: 1130
  source 1..746: mol_type = other DNA

SEQ ID NO: 24684 - DNA, 712 bp, synthetic construct; identical to SEQ ID NO: 869
  source 1..712: mol_type = other DNA

SEQ ID NO: 24685 - DNA, 753 bp, synthetic construct; identical to SEQ ID NO: 1210
  source 1..753: mol_type = other DNA

SEQ ID NO: 24686 - DNA, 747 bp, synthetic construct; identical to SEQ ID NO: 1159
  source 1..747: mol_type = other DNA

SEQ ID NO: 24687 - DNA, 725 bp, synthetic construct; identical to SEQ ID NO: 914
  source 1..725: mol_type = other DNA

SEQ ID NO: 24688 - DNA, 742 bp, synthetic construct; identical to SEQ ID NO: 1023
  source 1..742: mol_type = other DNA

SEQ ID NO: 24689 - DNA, 735 bp, synthetic construct; identical to SEQ ID NO: 949
  source 1..735: mol_type = other DNA

SEQ ID NO: 24690 - DNA, 741 bp, synthetic construct; identical to SEQ ID NO: 980
  source 1..741: mol_type = other DNA

SEQ ID NO: 24691 - DNA, 742 bp, synthetic construct; identical to SEQ ID NO: 994
  source 1..742: mol_type = other DNA

SEQ ID NO: 24692 - DNA, 743 bp, synthetic construct; identical to SEQ ID NO: 1044
  source 1..743: mol_type = other DNA

SEQ ID NO: 24693 - DNA, 745 bp, synthetic construct; identical to SEQ ID NO: 1111
  source 1..745: mol_type = other DNA

SEQ ID NO: 24694 - DNA, 742 bp, synthetic construct; identical to SEQ ID NO: 995
  source 1..742: mol_type = other DNA

SEQ ID NO: 24695 - DNA, 715 bp, synthetic construct; identical to SEQ ID NO: 884
  source 1..715: mol_type = other DNA

SEQ ID NO: 24696 - DNA, 758 bp, synthetic construct; identical to SEQ ID NO: 1221
  source 1..758: mol_type = other DNA

SEQ ID NO: 24697 - DNA, 741 bp, synthetic construct; identical to SEQ ID NO: 984
  source 1..741: mol_type = other DNA

SEQ ID NO: 24698 - DNA, 742 bp, synthetic construct; identical to SEQ ID NO: 990
  source 1..742: mol_type = other DNA

SEQ ID NO: 24699 - DNA, 744 bp, synthetic construct; identical to SEQ ID NO: 1077
  source 1..744: mol_type = other DNA

SEQ ID NO: 24700 - DNA, 743 bp, synthetic construct; identical to SEQ ID NO: 1041
  source 1..743: mol_type = other DNA

SEQ ID NO: 24701 - DNA, 742 bp, synthetic construct; identical to SEQ ID NO: 992
  source 1..742: mol_type = other DNA

SEQ ID NO: 24702 - DNA, 719 bp, synthetic construct; identical to SEQ ID NO: 894
  source 1..719: mol_type = other DNA

SEQ ID NO: 24703 - DNA, 754 bp, synthetic construct; identical to SEQ ID NO: 1215
  source 1..754: mol_type = other DNA

SEQ ID NO: 24704 - DNA, 749 bp, synthetic construct; identical to SEQ ID NO: 1192
  source 1..749: mol_type = other DNA

SEQ ID NO: 24705 - DNA, 745 bp, synthetic construct; identical to SEQ ID NO: 1086
  source 1..745: mol_type = other DNA

SEQ ID NO: 24706 - DNA, 711 bp, synthetic construct; identical to SEQ ID NO: 862
  source 1..711: mol_type = other DNA

SEQ ID NO: 24707 - DNA, 689 bp, synthetic construct; identical to SEQ ID NO: 826
  source 1..689: mol_type = other DNA

SEQ ID NO: 24708 - DNA, 711 bp, synthetic construct; identical to SEQ ID NO: 863
  source 1..711: mol_type = other DNA

SEQ ID NO: 24709 - DNA, 711 bp, synthetic construct; identical to SEQ ID NO: 861
  source 1..711: mol_type = other DNA

SEQ ID NO: 24710 - DNA, 728 bp, synthetic construct; identical to SEQ ID NO: 921
  source 1..728: mol_type = other DNA

SEQ ID NO: 24711 - DNA, 707 bp, synthetic construct; identical to SEQ ID NO: 850
  source 1..707: mol_type = other DNA

SEQ ID NO: 24712 - DNA, 745 bp, synthetic construct; identical to SEQ ID NO: 1094
  source 1..745: mol_type = other DNA

SEQ ID NO: 24713 - DNA, 710 bp, synthetic construct; identical to SEQ ID NO: 857
  source 1..710: mol_type = other DNA

SEQ ID NO: 24714 - DNA, 744 bp, synthetic construct; identical to SEQ ID NO: 1068
  source 1..744: mol_type = other DNA

SEQ ID NO: 24715 - DNA, 686 bp, synthetic construct; identical to SEQ ID NO: 823
  source 1..686: mol_type = other DNA

SEQ ID NO: 24716 - DNA, 648 bp, synthetic construct; identical to SEQ ID NO: 783
  source 1..648: mol_type = other DNA

SEQ ID NO: 24717 - DNA, 814 bp, synthetic construct; identical to SEQ ID NO: 1255
  source 1..814: mol_type = other DNA

SEQ ID NO: 24718 - DNA, 809 bp, synthetic construct; identical to SEQ ID NO: 1249
  source 1..809: mol_type = other DNA

SEQ ID NO: 24719 - DNA, 813 bp, synthetic construct; identical to SEQ ID NO: 1253
  source 1..813: mol_type = other DNA

SEQ ID NO: 24720 - DNA, 801 bp, synthetic construct; identical to SEQ ID NO: 1245
  source 1..801: mol_type = other DNA

SEQ ID NO: 24721 - DNA, 798 bp, synthetic construct; identical to SEQ ID NO: 1242
  source 1..798: mol_type = other DNA

SEQ ID NO: 24722 - DNA, 798 bp, synthetic construct; identical to SEQ ID NO: 1243
  source 1..798: mol_type = other DNA

SEQ ID NO: 24723 - DNA, 814 bp, synthetic construct; identical to SEQ ID NO: 1256
  source 1..814: mol_type = other DNA

SEQ ID NO: 24724 - DNA, 804 bp, synthetic construct; identical to SEQ ID NO: 1247
  source 1..804: mol_type = other DNA

SEQ ID NO: 24725 - DNA, 745 bp, synthetic construct; identical to SEQ ID NO: 1098
  source 1..745: mol_type = other DNA

SEQ ID NO: 24726 - DNA, 745 bp, synthetic construct; identical to SEQ ID NO: 1114
  source 1..745: mol_type = other DNA

SEQ ID NO: 24727 - DNA, 743 bp, synthetic construct; identical to SEQ ID NO: 1033
  source 1..743: mol_type = other DNA

SEQ ID NO: 24728 - DNA, 821 bp, synthetic construct; identical to SEQ ID NO: 1275
  source 1..821: mol_type = other DNA

SEQ ID NO: 24729 - DNA, 823 bp, synthetic construct; identical to SEQ ID NO: 1282
  source 1..823: mol_type = other DNA

SEQ ID NO: 24730 - DNA, 822 bp, synthetic construct; identical to SEQ ID NO: 1278
  source 1..822: mol_type = other DNA

SEQ ID NO: 24731 - DNA, 820 bp, synthetic construct; identical to SEQ ID NO: 1271
  source 1..820: mol_type = other DNA

SEQ ID NO: 24732 - DNA, 822 bp, synthetic construct; identical to SEQ ID NO: 1280
  source 1..822: mol_type = other DNA

SEQ ID NO: 24733 - DNA, 817 bp, synthetic construct; identical to SEQ ID NO: 1263
  source 1..817: mol_type = other DNA

SEQ ID NO: 24734 - DNA, 822 bp, synthetic construct; identical to SEQ ID NO: 1279
  source 1..822: mol_type = other DNA

SEQ ID NO: 24735 - DNA, 837 bp, synthetic construct; identical to SEQ ID NO: 1285
  source 1..837: mol_type = other DNA

SEQ ID NO: 24736 - DNA, 814 bp, synthetic construct; identical to SEQ ID NO: 1257
  source 1..814: mol_type = other DNA

SEQ ID NO: 24737 - DNA, 816 bp, synthetic construct; identical to SEQ ID NO: 1260
  source 1..816: mol_type = other DNA

SEQ ID NO: 24738 - DNA, 816 bp, synthetic construct; identical to SEQ ID NO: 1261
  source 1..816: mol_type = other DNA

SEQ ID NO: 24739 - DNA, 818 bp, synthetic construct; identical to SEQ ID NO: 1264
  source 1..818: mol_type = other DNA

SEQ ID NO: 24740 - DNA, 819 bp, synthetic construct; identical to SEQ ID NO: 1267
  source 1..819: mol_type = other DNA

SEQ ID NO: 24741 - DNA, 819 bp, synthetic construct; identical to SEQ ID NO: 1269
  source 1..819: mol_type = other DNA

SEQ ID NO: 24742 - DNA, 820 bp, synthetic construct; identical to SEQ ID NO: 1272
  source 1..820: mol_type = other DNA

SEQ ID NO: 24743 - DNA, 809 bp, synthetic construct; identical to SEQ ID NO: 1250
  source 1..809: mol_type = other DNA

SEQ ID NO: 24744 - DNA, 816 bp, synthetic construct; identical to SEQ ID NO: 1259
  source 1..816: mol_type = other DNA

SEQ ID NO: 24745 - DNA, 773 bp, synthetic construct; identical to SEQ ID NO: 1233
  source 1..773: mol_type = other DNA

SEQ ID NO: 24746 - DNA, 819 bp, synthetic construct; identical to SEQ ID NO: 1268
  source 1..819: mol_type = other DNA

SEQ ID NO: 24747 - DNA, 818 bp, synthetic construct; identical to SEQ ID NO: 1265
  source 1..818: mol_type = other DNA

SEQ ID NO: 24748 - DNA, 812 bp, synthetic construct; identical to SEQ ID NO: 1252
  source 1..812: mol_type = other DNA

SEQ ID NO: 24749 - DNA, 820 bp, synthetic construct; identical to SEQ ID NO: 1273
  source 1..820: mol_type = other DNA

SEQ ID NO: 24750 - DNA, 818 bp, synthetic construct; identical to SEQ ID NO: 1266
  source 1..818: mol_type = other DNA

SEQ ID NO: 24751 - DNA, 1000 bp, synthetic construct; identical to SEQ ID NO: 1463
  source 1..1000: mol_type = other DNA

SEQ ID NO: 24752 - DNA, 832 bp, synthetic construct; identical to SEQ ID NO: 2465
  source 1..832: mol_type = other DNA

SEQ ID NO: 24753 - DNA, 678 bp, synthetic construct; identical to SEQ ID NO: 2285
  source 1..678: mol_type = other DNA

SEQ ID NO: 24754 - DNA, 728 bp, synthetic construct; identical to SEQ ID NO: 2344
  source 1..728: mol_type = other DNA

SEQ ID NO: 24755 - DNA, 744 bp, synthetic construct; identical to SEQ ID NO: 1069
  source 1..744: mol_type = other DNA

SEQ ID NO: 24756 - DNA, 747 bp, synthetic construct; identical to SEQ ID NO: 1160
  source 1..747: mol_type = other DNA

SEQ ID NO: 24757 - DNA, 747 bp, synthetic construct; identical to SEQ ID NO: 1165
  source 1..747: mol_type = other DNA

SEQ ID NO: 24758 - DNA, 847 bp, synthetic construct; identical to SEQ ID NO: 1287
  source 1..847: mol_type = other DNA

SEQ ID NO: 24759 - DNA, 745 bp, synthetic construct; identical to SEQ ID NO: 1103
  source 1..745: mol_type = other DNA

SEQ ID NO: 24760 - DNA, 683 bp, synthetic construct; identical to SEQ ID NO: 820
  source 1..683: mol_type = other DNA

SEQ ID NO: 24761 - DNA, 665 bp, synthetic construct; identical to SEQ ID NO: 1432
  source 1..665: mol_type = other DNA

SEQ ID NO: 24762 - DNA, 545 bp, synthetic construct; identical to SEQ ID NO: 1440
  source 1..545: mol_type = other DNA

SEQ ID NO: 24763 - DNA, 744 bp, synthetic construct; identical to SEQ ID NO: 1059
  source 1..744: mol_type = other DNA

SEQ ID NO: 24764 - DNA, 808 bp, synthetic construct; identical to SEQ ID NO: 1248
  source 1..808: mol_type = other DNA

SEQ ID NO: 24765 - DNA, 735 bp, synthetic construct; identical to SEQ ID NO: 948
  source 1..735: mol_type = other DNA

SEQ ID NO: 24766 - DNA, 729 bp, synthetic construct; identical to SEQ ID NO: 922
  source 1..729: mol_type = other DNA

SEQ ID NO: 24767 - DNA, 736 bp, synthetic construct; identical to SEQ ID NO: 951
  source 1..736: mol_type = other DNA

SEQ ID NO: 24768 - DNA, 735 bp, synthetic construct; identical to SEQ ID NO: 947
  source 1..735: mol_type = other DNA

SEQ ID NO: 24769 - DNA, 646 bp, synthetic construct; identical to SEQ ID NO: 1347
  source 1..646: mol_type = other DNA

SEQ ID NO: 24770 - DNA, 610 bp, synthetic construct; identical to SEQ ID NO: 665
  source 1..610: mol_type = other DNA

SEQ ID NO: 24771 - DNA, 737 bp, synthetic construct; identical to SEQ ID NO: 955
  source 1..737: mol_type = other DNA

SEQ ID NO: 24772 - DNA, 755 bp, synthetic construct; identical to SEQ ID NO: 1218
  source 1..755: mol_type = other DNA

SEQ ID NO: 24773 - DNA, 803 bp, synthetic construct; identical to SEQ ID NO: 1246
  source 1..803: mol_type = other DNA

SEQ ID NO: 24774 - DNA, 711 bp, synthetic construct; identical to SEQ ID NO: 1346
  source 1..711: mol_type = other DNA

SEQ ID NO: 24775 - DNA, 601 bp, synthetic construct; identical to SEQ ID NO: 1353
  source 1..601: mol_type = other DNA

SEQ ID NO: 24776 - DNA, 612 bp, synthetic construct; identical to SEQ ID NO: 680
  source 1..612: mol_type = other DNA

SEQ ID NO: 24777 - DNA, 711 bp, synthetic construct; identical to SEQ ID NO: 1342
  source 1..711: mol_type = other DNA

SEQ ID NO: 24778 - DNA, 713 bp, synthetic construct; identical to SEQ ID NO: 871
  source 1..713: mol_type = other DNA

SEQ ID NO: 24779 - DNA, 601 bp, synthetic construct; identical to SEQ ID NO: 1354
  source 1..601: mol_type = other DNA

SEQ ID NO: 24780 - DNA, 766 bp, synthetic construct; identical to SEQ ID NO: 1227
  source 1..766: mol_type = other DNA

SEQ ID NO: 24781 - DNA, 770 bp, synthetic construct; identical to SEQ ID NO: 1230
  source 1..770: mol_type = other DNA

SEQ ID NO: 24782 - DNA, 712 bp, synthetic construct; identical to SEQ ID NO: 1304
  source 1..712: mol_type = other DNA

SEQ ID NO: 24783 - DNA, 629 bp, synthetic construct; identical to SEQ ID NO: 1317
  source 1..629: mol_type = other DNA

SEQ ID NO: 24784 - DNA, 677 bp, synthetic construct; identical to SEQ ID NO: 1313
  source 1..677: mol_type = other DNA

SEQ ID NO: 24785 - DNA, 709 bp, synthetic construct; identical to SEQ ID NO: 1360
  source 1..709: mol_type = other DNA

SEQ ID NO: 24786 - DNA, 650 bp, synthetic construct; identical to SEQ ID NO: 1364
  source 1..650: mol_type = other DNA

SEQ ID NO: 24787 - DNA, 752 bp, synthetic construct; identical to SEQ ID NO: 128
  source 1..752: mol_type = other DNA

SEQ ID NO: 24788 - DNA, 730 bp, synthetic construct; identical to SEQ ID NO: 1370
  source 1..730: mol_type = other DNA

SEQ ID NO: 24789 - DNA, 801 bp, synthetic construct; identical to SEQ ID NO: 2435
  source 1..801: mol_type = other DNA

SEQ ID NO: 24790 - DNA, 716 bp, synthetic construct; identical to SEQ ID NO: 888
  source 1..716: mol_type = other DNA

SEQ ID NO: 24791 - DNA, 625 bp, synthetic construct; identical to SEQ ID NO: 743
  source 1..625: mol_type = other DNA

SEQ ID NO: 24792 - DNA, 625 bp, synthetic construct; identical to SEQ ID NO: 741
  source 1..625: mol_type = other DNA

SEQ ID NO: 24793 - DNA, 627 bp, synthetic construct; identical to SEQ ID NO: 752
  source 1..627: mol_type = other DNA

SEQ ID NO: 24794 - DNA, 596 bp, synthetic construct; identical to SEQ ID NO: 645
  source 1..596: mol_type = other DNA

SEQ ID NO: 24795 - DNA, 628 bp, synthetic construct; identical to SEQ ID NO: 753
  source 1..628: mol_type = other DNA

SEQ ID NO: 24796 - DNA, 700 bp, synthetic construct; identical to SEQ ID NO: 843
  source 1..700: mol_type = other DNA

SEQ ID NO: 24797 - DNA, 698 bp, synthetic construct; identical to SEQ ID NO: 839
  source 1..698: mol_type = other DNA

SEQ ID NO: 24798 - DNA, 741 bp, synthetic construct; identical to SEQ ID NO: 976
  source 1..741: mol_type = other DNA

SEQ ID NO: 24799 - DNA, 741 bp, synthetic construct; identical to SEQ ID NO: 975
  source 1..741: mol_type = other DNA

SEQ ID NO: 24800 - DNA, 737 bp, synthetic construct; identical to SEQ ID NO: 959
  source 1..737: mol_type = other DNA

SEQ ID NO: 24801 - DNA, 737 bp, synthetic construct; identical to SEQ ID NO: 958
  source 1..737: mol_type = other DNA

SEQ ID NO: 24802 - DNA, 725 bp, synthetic construct; identical to SEQ ID NO: 913
  source 1..725: mol_type = other DNA

SEQ ID NO: 24803 - DNA, 731 bp, synthetic construct; identical to SEQ ID NO: 932
  source 1..731: mol_type = other DNA

SEQ ID NO: 24804 - DNA, 654 bp, synthetic construct; identical to SEQ ID NO: 791
  source 1..654: mol_type = other DNA

SEQ ID NO: 24805 - DNA, 673 bp, synthetic construct; identical to SEQ ID NO: 816
  source 1..673: mol_type = other DNA

SEQ ID NO: 24806 - DNA, 625 bp, synthetic construct; identical to SEQ ID NO: 3283
  source 1..625: mol_type = other DNA

SEQ ID NO: 24807 - DNA, 630 bp, synthetic construct; identical to SEQ ID NO: 3284
  source 1..630: mol_type = other DNA

SEQ ID NO: 24808 - DNA, 653 bp, synthetic construct; identical to SEQ ID NO: 3285
  source 1..653: mol_type = other DNA

SEQ ID NO: 24809 - DNA, 625 bp, synthetic construct; identical to SEQ ID NO: 3283
  source 1..625: mol_type = other DNA

SEQ ID NO: 24810 - DNA, 630 bp, synthetic construct; identical to SEQ ID NO: 3284
  source 1..630: mol_type = other DNA

SEQ ID NO: 24811 - DNA, 653 bp, synthetic construct; identical to SEQ ID NO: 3285
  source 1..653: mol_type = other DNA

SEQ ID NO: 24812 - DNA, 625 bp, synthetic construct; identical to SEQ ID NO: 3283
  source 1..625: mol_type = other DNA

SEQ ID NO: 24813 - DNA, 630 bp, synthetic construct; identical to SEQ ID NO: 3284
  source 1..630: mol_type = other DNA

SEQ ID NO: 24814 - DNA, 653 bp, synthetic construct; identical to SEQ ID NO: 3285
  source 1..653: mol_type = other DNA

SEQ ID NO: 24815 - DNA, 625 bp, synthetic construct; identical to SEQ ID NO: 3283
  source 1..625: mol_type = other DNA

SEQ ID NO: 24816 - DNA, 630 bp, synthetic construct; identical to SEQ ID NO: 3284
  source 1..630: mol_type = other DNA

SEQ ID NO: 24817 - DNA, 653 bp, synthetic construct; identical to SEQ ID NO: 3285
  source 1..653: mol_type = other DNA

SEQ ID NO: 24818 - DNA, 625 bp, synthetic construct; identical to SEQ ID NO: 3283
  source 1..625: mol_type = other DNA

SEQ ID NO: 24819 - DNA, 630 bp, synthetic construct; identical to SEQ ID NO: 3284
  source 1..630: mol_type = other DNA

SEQ ID NO: 24820 - DNA, 653 bp, synthetic construct; identical to SEQ ID NO: 3285
  source 1..653: mol_type = other DNA

SEQ ID NO: 24821 - DNA, 625 bp, synthetic construct; identical to SEQ ID NO: 3283
  source 1..625: mol_type = other DNA

SEQ ID NO: 24822 - DNA, 630 bp, synthetic construct; identical to SEQ ID NO: 3284
  source 1..630: mol_type = other DNA

SEQ ID NO: 24823 - DNA, 653 bp, synthetic construct; identical to SEQ ID NO: 3285
  source 1..653: mol_type = other DNA

SEQ ID NO: 24824 - DNA, 625 bp, synthetic construct; identical to SEQ ID NO: 3283
  source 1..625: mol_type = other DNA

SEQ ID NO: 24825 - DNA, 630 bp, synthetic construct; identical to SEQ ID NO: 3284
  source 1..630: mol_type = other DNA

SEQ ID NO: 24826 - DNA, 653 bp, synthetic construct; identical to SEQ ID NO: 3285
  source 1..653: mol_type = other DNA

SEQ ID NO: 24827 - DNA, 625 bp, synthetic construct; identical to SEQ ID NO: 3283
  source 1..625: mol_type = other DNA

SEQ ID NO: 24828 - DNA, 630 bp, synthetic construct; identical to SEQ ID NO: 3284
  source 1..630: mol_type = other DNA

SEQ ID NO: 24829 - DNA, 653 bp, synthetic construct; identical to SEQ ID NO: 3285
  source 1..653: mol_type = other DNA

SEQ ID NO: 24830 - DNA, 466 bp, Drosophila sp.
  source 1..466: mol_type = genomic DNA
gataatgtaaactcagcttacacacaaaaaagcagtaaaatataaaatacaaaaattaacagctgcgtttatctatagatatatatatacacatctatatatttgaataagcgttcgatttgaatcaaaattatagcccaagctatcagctacccccacaagctttgtactccacaaaaacgctaacgagcaaaatcgataaagaccagatagcaaatgaaatcataccatctgccatagatctatgctataaacatatataggtgctgatctgtgctcttgaatttagtgttttttgtgtgtgcgtgtcgcgagaggagcactcaaaaccaaaaaaaaaaaaaaaaacgtatagtaaaacaaaaaactatctctagtcgctaggctataactatacaaactccagctatcccagatccagatccgtaaacagcaaatagttatatatctataaccccaaaatacg

SEQ ID NO: 24831 - DNA, 1153 bp, Drosophila sp.
  source 1..1153: mol_type = genomic DNA
ctgcccgtgcacgtaattcttcatatcgtcgtttaatcgccttcctgccctatgcactatatatcagcaacaactacaactaaaatttcaaacaaaaagcaatcgtaaaagcaaagaataatagtaaatgtcgtaattggaacaaatgttgtacatacctacggatacattgtaaataaattgtacgatattgcgaaatacccgaaatatgacgatacaagctatagcgattaggcttcttccaaatccattttatatccatcccgtttttaacatgaaaccatttttcggttttcataattgatcaaataacctgactagcttccatttaaattaaagagtatcggatattcaattgtcgacctactgcgaccttctatcaaaaatcataaattatatcaataatcggacattttcattcgatagaatctttggccagcaaaatttagctagaagacaaaatatacaagaagaggaatttttgcatactaaatttaacgaacctatacggaaattgcaaataaagcaagaaaggacaaacaaagcagagagacccaacaataattagcattaaaaattggttaacaaacagaagacccaaaaatatcgaaataaaggattagttctacgcccattgtgattattaattttagacataggccaagaaaccaacagcaattcaaagggaatcgttgctcacaaatagaaaagcagcacaacacgaccaaaaagcaaagcgaaagcaagagagaagcaaagcaaaagcgagaagcaacattagccgcccaaagaaactggaaagcattagccaaaaactcttagttcaattccatccaacaaccaaaaccaaactctcggctatgacaaatgtgaggcgttcaaactgaaaaaaaaagaaagataaaaaacctattgatgcggctgccgaacccagaaacaactcagtttcaactcttgccctgtggcatctgtcctctatatatatttgtatagtatatacatatatatctgatctgaagttccaagtcgcgagtgcgtttccgtttccgtattcgcgtccattttcgtttcggtttcgttggaaagctagagcggctgctgccactgccacagtttcttcgatcggaaccggatttgggaaacagccgccaag

SEQ ID NO: 24832 - DNA, 426 bp, Drosophila sp.
  source 1..426: mol_type = genomic DNA
gtcgcaacggtggaaagtcaaacaaagaatccacaggagtgtctactcctgctccgggctctgcatccggaagcaatagtggaaacacgactccggctcacaaatctagtgcgctggatgggtccgataaggacagcggcggcataaatgccagcgcagtagccgcggcggtcacaagcattcacgatccaaatcactggagcaagaaggagaagtacgacgctgatgcgtacttggaaggcgcctacaagaagcatttaggcagacacgccaataagtgagtcgtgtggaatcgaactcgttataagatatttccaaatttgagatggactgttgctaacaatttttttcgctctcttttccctttattttcatacattttgtttatttaatgtaaacatttacagggttttgctgcgcgtgagg

SEQ ID NO: 24833 - DNA, 319 bp, unidentified
  source 1..319: mol_type = unassigned DNA; note = mammalian sequence
actaggactcaagatggccaccgcgcccgctagtcatctcgctagcccgcgcgccagtgagctggcacgagacacgcggtggcccacggcgtctggggacgatctccagcccttcgcacggggcggagcgcccgccttccctccaatcagcacgccgggccggctagccaggggccgcccgcgcgcggggtgtgtgaggacgcgctcccagtcgctgagtgcctgagccgggaagcagttgctgtggtacctgctgctgcccgagcggacgtagagcatcggacgcgggcgccgtggcgctgggcaggagggcgaagcc

SEQ ID NO: 24834 - DNA, 40 bp, unidentified
  source 1..40: mol_type = unassigned DNA; note = mammalian sequence
attccagcgcctgacagccaggaccccaggcagcagcgag

SEQ ID NO: 24835 - DNA, 233 bp, unidentified
  source 1..233: mol_type = unassigned DNA; note = mammalian sequence
cagagatccaggggaggcgcctgtgaggcccggacctgccccggggcgaagggtatgtggcgagacagagccctgcacccctaattcccggtggaaaactcctgttgccgtttccctccaccggcctggagtctcccagtcttgtcccggcagtgccgccctccccactaagacctaggcgcaaaggcttggctcatggttgacagctcagagagagaaagatctgagggaag

SEQ ID NO: 24836 - DNA, 348 bp, unidentified
  source 1..348: mol_type = unassigned DNA; note = mammalian sequence
ttaagtacaaggtaaatatattttattcttaatattttaaggaatttgatttagacatttttcctttctagggacagtttggataattttccgtgaaactggatgatctttgaatattaaatgaaaggagactagaataacagtctcttgactattcatgaaggagctttagcagaagcattctttcttggtgtgcaaatcacgcctggcagcccctgcccacagtacccgaagatggcaggccttgttcccttcacctaaattcataaacctgggtgtagtggcttctgatgctgatttgtttctcttttcagtaagtgtggacctttgtgtaccagagagaacatc

SEQ ID NO: 24837 - DNA, 132 bp, unidentified
  source 1..132: mol_type = unassigned DNA; note = mammalian sequence
atgaagaagaaaacccggcgccgctcgacccggagcgaggagttgacccggagcgaggagttgaccctgagtgaggaagcgacctggagtgaagaggcgacccagagtgaggaggcgacccagggcgaagag

SEQ ID NO: 24838 - DNA, 1137 bp, unidentified
  source 1..1137: mol_type = unassigned DNA; note = mammalian sequence
aaaaaataaaaccctcccccaccacctccttctccccacccctcgccgcaccacacacagcgcgggcttctagcgctcggcaccggcgggccaggcgcgtcctgccttcatttatccagcagcttttcggaaaatgcatttgctgttcggagtttaatcagaagacgattcctgcctccgtccccggctccttcatcgtcccatctcccctgtctctctcctggggaggcgtgaagcggtcccgtggatagagattcatgcctgtgtccgcgcgtgtgtgcgcgcgtataaattgccgagaaggggaaaacatcacaggacttctgcgaataccggactgaaaattgtaattcatctgccgccgccgctgccaaaaaaaaactcgagctcttgagatctccggttgggattcctgcggattgacatttctgtgaagcagaagtctgggaatcgatctggaaatcctcctaatttttactccctctccccccgactcctgattcattgggaactttcaaatcagctataactggagagtgctgaagattgatgggatcgttgccttatgcatttgttttggttttacaaaaaggaaacttgacagaggatcatgctgtacttaaaaaatacaagtaagtctcgcacaggaaattggtttaatgtaactttcaatggaaacctttgagattttttacttaaagtgcattcgagtaaatttaatttccaggcagcttaatacattgtttttagccgtgttacttgtagtgtgtatgccctgctttcactcagtgtgtacagggaaacgcacctgattttttacttattagtttgttttttctttaacctttcagcatcacagaggaagtagactgatattaacaatacttactaataataacgtgcctcatgaaataaagatccgaaaggaattggaataaaaatttcctgcgtctcatgccaagagggaaacaccagaatcaagtgttccgcgtgattgaagacaccccctcgtccaagaatgcaaagcacatccaataaaatagctggattataactcctcttctttctctgggggccgtggggtgggagctggggcgagaggtgccgttggcccccgttgcttttcctctgggaagg

SEQ ID NO: 24839 - DNA, 150 bp, unidentified
  source 1..150: mol_type = unassigned DNA; note = mammalian sequence
tgatttctttttgtggtaaaaatcttagttcatgtgaagaaatttcatgtgaatgttttagctatcaaacagtactgtcacctactcatgcacaaaactgcctcccaaagacttttcccaggtccctcgtatcaaaacattaagagtata

SEQ ID NO: 24840 - DNA, 166 bp, unidentified
  source 1..166: mol_type = unassigned DNA; note = mammalian sequence
cacacggactacaggggagttttgttgaagttgcaaagtcctggagcctccagagggctgtcggcgcagtagcagcgagcagcagagtccgcacgctccggcgaggggcagaagagcgcgagggagcgcggggcagcagaagcgagagccgagcgcggacccagcc

SEQ ID NO: 24841 - DNA, 472 bp, unidentified
  source 1..472: mol_type = unassigned DNA; note = mammalian sequence
cttcttcgtcagcctcccttccaccgccatattgggccactaaaaaaagggggctcgtcttttcggggtgtttttctccccctcccctgtccccgcttgctcacggctctgcgactccgacgccggcaaggtttggagagcggctgggttcgcgggacccgcgggcttgcacccgcccagactcggacgggctttgccaccctctccgcttgcctggtcccctctcctctccgccctcccgctcgccagtccatttgatcagcggagactcggcggccgggccggggcttccccgcagcccctgcgcgctcctagagctcgggccgtggctcgtcggggtctgtgtcttttggctccgagggcagtcgctgggcttccgagaggggttcgggctgcgtaggggcgctttgttttgttcggttttgtttttttgagagtgcgagagaggcggtcgtgcagacccgggagaaag

SEQ ID NO: 24842 - DNA, 429 bp, unidentified
  source 1..429: mol_type = unassigned DNA; note = mammalian sequence
tgctgcttatggcggcgctggagagggggcgctgagctgttgggtatgaagtgtaacagaacagactttaccacctgaaactgctgcttcaagttcagatcaggcaaggaacaaacctcgtaacaactaacaagaccaaagaagagtacacttaagttgaagacacaacacttgatctgaaacaagaagtttgtgcctactcaacagctttgaaagagcacttcccaacgctgctagtagtctttgttttcttcagtgctgtactgtgagattgcccggtacagcagcagttgtattctttattagcttggtagatcattttctctcgctcttttttttaatactagcaactttcatcctttgaaacgtgtgctgaaaaagaagaatcagcaaatactactgaaagtgcaatatttgagtatcactgcg

SEQ ID NO: 24843 - DNA, 305 bp, unidentified
  source 1..305: mol_type = unassigned DNA; note = mammalian sequence
cagcagtgagtcggagctctatggaggtggcagcgggtaccgagtggcggctgcagcagcgactcctctgagctgagtttgaggccgtccccgactccttcctcccccttccctcccccttttttttgttttccgttcccctttcccctcccttccctatccccgacgaccggatcctgaggaggcagctgcggtggcagctgctgagttctcggtgaaggtatttcatttctcctgtcccctcccctccccaccccatctattaatattattcttttgaagattcttcgttgtcaagccgccaa

SEQ ID NO: 24844 - DNA, 344 bp, unidentified
  source 1..344: mol_type = unassigned DNA; note = mammalian sequence
cgttaaatgcaaacgctgctctggctcatgtgtttgctccgaggtataggttttgttcgactgacgtatcagatagtcagagtggttaccacaccgacgttgtagcagctgcataataaatgactgaaagaatcatgttaggcatgcccacctaacctaacttgaatcatgcgaaaggggagctgttggaattcaaatagactttctggttcccagcagtcggcagtaatagaatgctttcaggaagatgacagaatcaggagaaagatgctgttttgcactatcttgatttgttacagcagccaacttattggcatgatggagtgacaggaaaaacagctggc

SEQ ID NO: 24845 - DNA, 93 bp, unidentified
  source 1..93: mol_type = unassigned DNA; note = mammalian sequence
gttgatttagtgaatattggaagtactgacatcgtagatggaaatcataaactgactcttggtttgatttggaatataatcctccactggcag

SEQ ID NO: 24846 - RNA, 40 nt, unidentified
  source 1..40: mol_type = unassigned RNA; note = mammalian sequence
ggggaccgcgccccacatgtgagtgaggccgaaacataga

SEQ ID NO: 24847 - DNA, 101 bp, unidentified
  source 1..101: mol_type = unassigned DNA; note = mammalian sequence
ggcagggtggagaggtgggctcttcctgcttcccactcatcttatagctttctttccccagatccgaattcgagatccaaaccaaggaggaaaggatatca

SEQ ID NO: 24848 - DNA, 434 bp, unidentified
  source 1..434: mol_type = unassigned DNA; note = mammalian sequence
gtgggcataccagtgtcagctgcacttgtaggggcccaagtgcctcatgacccactcggcagccttcctctccaggatccccaaggctaggaggccaacctactaacaggtgggtgggtatggtgtgtggtttcactcagttcttctcatggggtttctctgagctccattcataccagaaagggagcaggagagagaggacaagtggatccaacagccttcgctccaggggaatcagggcatcgcctccttttctgggaggacactcccttctgatggtgaatgggaactcccttcctcctgcagcagcctgcctgcagctgtcctggtagaacagtgtggacattgcagaagctgtcactgccccagaaagaaagcaccccagagccaaggcaaagagtcttgaaagcgccacaagcagcagctgctgagcc

SEQ ID NO: 24849 - DNA, 229 bp, unidentified
  source 1..229: mol_type = unassigned DNA; note = mammalian sequence
acttccggtggagggccgcctctgagcgggcggcgggccgacggcgagcgcgggcggcggcggtgacggaggcgccgctgccagggggcgtgcggcagcgcggcggcggcggcggcggcggcggcggcggaggcggcggcggcggcggcggcggcggcggctgggcctcgagcgcccgcagcccacctctcgggggcgggctcccggcgctagcagggctgaagagaag

SEQ ID NO: 24850 - DNA, 216 bp, unidentified
  source 1..216: mol_type = unassigned DNA; note = mammalian sequence
ataacggctagcctgaggagctgctgcgacagtccactacctttttcgagagtgactcccgttgtcccaaggcttcccagagcgaacctgtgcggctgcaggcaccggcgcgtcgagtttccggcgtccggaaggaccgagctcttctcgcggatccagtgttccgtttccagcccccaatctcagagcggagccgacagagagcagggaaccggc

SEQ ID NO: 24851 - DNA, 174 bp, unidentified
  source 1..174: mol_type = unassigned DNA; note = mammalian sequence
tttgggcattgtccccgggtcttccaacggactgggcgttgctcccggacactgaggactggccccggggtctcgctcaccttcagcagcgtccaccgcctgccacagagcgttcgatcgctcgctgcctgagctcctggtgcgcccgcggacgcagcctccagcttcgcggag

SEQ ID NO: 24852 - DNA, 335 bp, unidentified
  source 1..335: mol_type = unassigned DNA; note = mammalian sequence
gggacctggaagcgccccagccccgcagcgatcgcagattcggctttcaaacaaaagaggcgccccggggggtgggaccgggacctcacccggtcctcgcagagttgcggccgcccgccccttcagccccggctctccgtatgcgcatgagcagaggcgcctccctctgttcctcccaaggctaaactttctaattcccttctttgggctcgggggctcccggagcagggcgagagctcgcgtcgccggaaaggaagacgggaagaaagggcaggcggctcggcgggcgtcttctccactcctctgccgcgtccccgtggctgcagggagccggc

SEQ ID NO: 24853 - DNA, 1177 bp, unidentified
  source 1..1177: mol_type = unassigned DNA; note = mammalian sequence
gcgcgggaggaggagaagcagtggggaggcgcagccgctcacctgcggggcagggcgcggaggagggacccgggctgcgcgctctcgggccgaggaaccaggacgcgcccggagcctcgcacgcggccaagctcggggcgtcccctcccctcggccgggcgaactcaaggggcgcagctctttgctttgacagagctggccggcggaggcgtgcagagcggcgagccggcgagccaggctgagaaactcgagccgggaacaaagaggggtcggactgagtgtgtgtgtcggctcgagctccgggcagaggcatttgggcccgaggcccccgctgtgactccccgagactccgcagtgccctccactgcggagtccccgcgcttgccggcaaaaactttattcttggcaaacttctctttctcttcccctcctcctcggcccccatcttctgctcctcctccttctctagcagattaaatgagcctcgagaagaaaaaccgaagcgaaagggaagaaaataagaagatctaaaacggacatctccagcgtgggtggctcctttttctttttctttttttcccacccttcaggaagtggacgtttcgttatcttctgatccttgcaccttcttttggggcaaacggggcccttctgcccagatcccctctcttttctcggaaaacaaactactaagtcggcatccggggtaactacagtggagagggtttccgcggagacgcgccgccggaccctcctctgcactttggggaggcgtgctccctccagaaccggcgttctccgcgcgcaaatcccggcgacgcggggtcgcggggtggccgccggggcagcctcgtctagcgcgcgccgcgcagacgcccccggagtcgccagctaccgcagccctcgccgcccagtgcccttcggcctcgggggcgggcgcctgcgtcggtctccgcgaagcgggaaagcgcggcggccgccgggattcgggcgccgcggcagctgctccggctgccggccggcggccccgcgctcgcccgccccgcttccgcccgctgtcctgctgcacgaacccttccaactctcctttcctcccccacccttgagttacccctctgtctttcctgctgttgcgcgggtgctcccacagcggagcggagattacagagccgccggg

SEQ ID NO: 24854 - DNA, 125 bp, unidentified
  source 1..125: mol_type = unassigned DNA; note = mammalian sequence
ttctccccgtgctcccccgttcttccctgcggagtgcgctgcgccgcccagccctgtcgccccccggaggtgatccctccctcctgcctgcccgccagcctgacctgtgcccggctcgcgggccg

SEQ ID NO: 24855 - DNA, 150 bp, unidentified
  source 1..150: mol_type = unassigned DNA; note = mammalian sequence
atatcaacctgtttcctcctcctccttctcctcctcctccgtgacctcctcctcctctttctcctgagaaacttcgccccagcggtgcggagcgccgctgcgcagccggggagggacgcaggcaggcggcgggcagcgggaggcggcagc

SEQ ID NO: 24856 - DNA, 367 bp, unidentified
  source 1..367: mol_type = unassigned DNA; note = mammalian sequence
aattccagcgagaggcagagggagcgagcgggcggccggctagggtggaagagccgggcgagcagagctgcgctgcgggcgtcctgggaagggagatccggagcgaatagggggcttcgcctctggcccagccctcccgctgatcccccagccagcggtccgcaacccttgccgcatccacgaaactttgcccatagcagcgggcgggcactttgcactggaacttacaacacccgagcaaggacgcgactctcccgacgcggggaggctattctgcccatttggggacacttccccgccgctgccaggacccgcttctctgaaaggctctccttgcagctgcttagacgctggatttttttcgggt

SEQ ID NO: 24857 - DNA, 100 bp, unidentified
  source 1..100: mol_type = unassigned DNA; note = mammalian sequence
ggcccccgccttccgcgccccccacgggaaggaagcacccccggtattaaaacgaacggggcggaaagaagccctcagtcgccggccgggaggcgagccg

SEQ ID NO: 24858 - DNA, 149 bp, unidentified
  source 1..149: mol_type = unassigned DNA; note = mammalian sequence
atgggaacgtagaactcgtcatgacacttgtggtaaaataacattattcgcttgcaaaaaacgatgtactttgacaatttaagacacaaaaaaacacaacctcgacaatttaggagttagagaggtcgtgttttgagattagtgagact

SEQ ID NO: 24859 - DNA, 637 bp, unidentified
  source 1..637: mol_type = unassigned DNA; note = mammalian sequence
cagagtaatgacatggttccttccatcctccaaaggtgaccaataatagtttgtaagtatcattatgaactaatgaattttcaacatatttgatatatttcaatccattgccatcattgttcttatcgatatttgagttggctcactttgccagtaagagtctattcaaattggcttctgagtccatttgacacaacacctttgatctttgacagtttccttggttttaggtgctagatgatttctcaggctcaccttagacatttcctgccacagacttagaatcagccatttctctaaggaccctgattccatttcatgagaaatgatagagaccacaatcaaaacaagtcatgaatttatactgatattttcaattcaaattaaagatgaggtttttgctaaatttttttgagtttatatttgtatgtcttatgctgaaaaatcttgtttcctaattagtaacataattattcatttgatgggtaaatattttagggccgattctttggttttatagccaagataccctgttgataaagtcttgtgggagcaattataagactggcttattttgaagctttttaaaaaagacatccttacctgttttaactgtagattatattaacttaaatag

SEQ ID NO: 24860 - DNA, 142 bp, unidentified
  source 1..142: mol_type = unassigned DNA; note = mammalian sequence
tcactgccatggaggagccgcagtcagatcctagcgtcgagccccctctgagtcaggaaacattttcagacctatggaaactacttcctgaaaacaacgttctgtcccccttgccgtcccaagcaatggatgatttgatgct

SEQ ID NO: 24861 - DNA, 396 bp, unidentified
  source 1..396: mol_type = unassigned DNA; note = mammalian sequence
ctcgagctgccgttgcaaagccaactttggaaaaagttttttgggggagacttgggccttgaggtgcccagctccgcgctttccgattttgggggcctttccagaaaatgttgcaaaaaagctaagccggcgggcagaggaaaacgcctgtagccggcgagtgaagacgaaccatcgactgccgtgttccttttcctcttggaggttggagtcccctgggcgcccccacacggctagacgcctcggctggttcgcgacgcagccccccggccgtggatgctcactcgggctcgggatccgcccaggtagcggcctcggacccaggtcctgcgcccaggtcctcccctgccccccagcgacggagccggggccgggggcggcggcgcccgggggcca

SEQ ID NO: 24862 - DNA, 396 bp, unidentified
  source 1..396: mol_type = unassigned DNA; note = mammalian sequence
cagcctctgcagcggccgcggtggctgaggaggcccgagaggagtcggtggcagcggcggcggcgggaccggcagcagcagcagcagcagcagcagcaaccactagcctcctgccccgcggcgctgccgcacgagccccacgagccgctcaccccgccgttctcagcgctgcccgaccccgctggcgcgccctcccgccgccagtcccggcagcgccctcagttgtcctccgactcgccctcggccttccgcgccagccgcagccacagccgcaacgccacccgcagccacagccacagccacagccccaggcatagccttcggcacagccccggctccggctcctgcggcagctcctctgggcaccgtccctgcgccgacatcctggaggttggg

SEQ ID NO: 24863 - DNA, 1578 bp, unidentified
  source 1..1578: mol_type = unassigned DNA; note = mammalian sequence
catagagccagcgggcgcgggcgggacgggcgccccgcggccggacccagccagggcaccacgctgcccggccctgcgccgccaggcacttctttccggggctcctagggacgccagaaggaagtcaacctctgctgcttctccttggcctgcgttggaccttcctttttttgttgtttttttttgtttttcccctttcttccttttgaattaactggcttcttggctggatgttttcaacttctttcctggctgcgaacttttccccaattgttttccttttacaacagggggagaaagtgctctgtggtccgaggcgagccgtgaagttgcgtgtgcgtggcagtgtgcgtggcaggatgtgcgtgcgtgtgtaacccgagccgcccgatctgtttcgatctgcgccgcggagccctccctcaaggcccgctccacctgctgcggttacgcggcgctcgtgggtgttcgtgcctcggagcagctaaccggcgggtgctgggcgacggtggaggagtatcgtctcgctgctgcccgagtcagggctgagtcacccagctgatgtagacagtggctgccttccgaagagtgcgtgtttgcatgtgtgtgactctgcggctgctcaactcccaacaaaccagaggaccagccacaaacttaaccaacatccccaaacccgagttcacagatgtgggagagctgtagaaccctgagtgtcatcgactgggccttcttatgattgttgttttaagattagctgaagatctctgaaacgctgaattttctgcactgagcgttttgacagaattcattgagagaacagagaacatgacaagtacttctagctcagcactgctccaactactgaagctgattttcaaggctacttaaaaaaatctgcagcgtacattaatggatttctgttgtgtttaaattctccacagattgtattgtaaatattttatgaagtagagcatatgtatatatttatatatacgtgcacatacattagtagcactacctttggaagtctcagctcttgcttttcgggactgaagccagttttgcatgataaaagtggccttgttacgggagataattgtgttctgttgggactttagacaaaactcacctgcaaaaaactgacaggcattaactactggaacttccaaataatgtgtttgctgatcgttttactcttcgcataaatattttaggaagtgtatgagaattttgccttcaggaacttttctaacagccaaagacagaacttaacctctgcaagcaagattcgtggaagatagtctccactttttaatgcactaagcaatcggttgctaggagcccatcctgggtcagaggccgatccgcagaaccagaacgttttcccctcctggactgttagtaacttagtctccctcctcccctaaccacccccgcccccccccaccccccgcagtaataaaggcccctgaacgtgtatgttggtctcccgggagctgcttgctgaagatccgcgcccctgtcgccgtctggtaggagctgtttgcagggtcctaactcaatcggcttgttgtg

SEQ ID NO: 24864 - DNA, 199 bp, unidentified
  source 1..199: mol_type = unassigned DNA; note = mammalian sequence
gcaatccggagtgtcagctctccatctgtctctgcctggcaggcgcacgcgcccagcaccctgcctccggcgatgccgccccagcccctctgatggccctcctctctgctgccactcattccagaacaggaggcatgagcccggaacgcgcttgcttttaggagacagccactttctgtgtggtacgctggattcaagg

SEQ ID NO: 24865 - DNA, 918 bp, unidentified
  source 1..918: mol_type = unassigned DNA; note = mammalian sequence
ggactctgagggctttttggagctcgctatgcttaacctggagatgattaaggccccgcttcctggcctcccagcctctaatgccaaaagataagggagaggctggcgtgtgaccccgttttgagtcaggtggacagagggctggccaccttcggaaccatgggtgcaatacggagtcagacctcaatacaagcccactctttcacatatttgaacttttttcacatatcaactttttttgttcactgtgcagggattgttcattgctgctggaggaagatcatggactgtcgcgggaaactgaagtggttgagtatccactagtcgtggatgagggcagtgacttcgcagttttttgcgaattacacatctctttgattatgttgtgactagttttgttagatagtcatttagtgtttgggatacctgttaagccctttgtccagggactgtggttggatttatgaattatttggacggttgtccacttgaaagaactgacagtagcttcataacaatgttacaaatctcgttctaagattaagctgttgaacctatatttgccattagcgcttaatttttgaagtattatttttatgaatcaagccctggaaaaggacaagatatttgaatgaaatagcacccataatggagaacttcacagttgctactcctgtgataggtttatcttagtttcattgtggtataaatggaatagcaggtgttgtcaggtacaaggtttgtagcttgccaatatgttcattaccaacactgcagattcccattgagttggtgggggttttgttacctttgttttttttctcagcaaaataattctataactttttgtttgtgacaagaaatggactttcagtttacttaagattaatacttcttgaatgataaaatcattttgcc

SEQ ID NO: 24866 - DNA, 460 bp, unidentified
  source 1..460: mol_type = unassigned DNA; note = mammalian sequence
cttgtaaaaacaactttgatgccttgaatatataatgattcattataacaattatgcatagattttaataatctgcatattttatgctttcatgtttttcctaattaatgatttgacatggttaataattataatatattctgcatcacagtttacatatttatgtaaaataagcatttaaaaattattagttttattctgcctgcttaaatattactttcctcaaaaagagaaaacaaaaatgctagattttactttatgacttgaatgatgtggtaatgtcgaactctagtatttagaattagaatgtttcttagcggtcgtgtagttatttttatgtcataagtggataatttgttagctcctataacaaaagtctgttgcttgtgtttcacattttggatttcctaatataatgttctctttttagaaaaggtggacaagtcctattttcaagaga

SEQ ID NO: 24867 - DNA, 769 bp, synthetic construct
  source 1..769: mol_type = other DNA
tcnnnnnnannnnnnnncnnttnaaannnnctgtgggttgttcccacncacagggcccactgggcgctagcactctgatttnacgaaatcnttgtgcgcctgttttatatcccttcccccnantnngaaacntagaagcaatgcgcancactgatcaatagnaggcgtaacgcgccagttacgtcatgatcaagcanatctgtnnccccggacngagtatcaatagactgcttncgcggttgaaggagaaanngttcgttanccggctaactacttcgagaagcccagtancaccatggaagctgcagggtgtttcgctcagcacttcccccgtgtagatcaggtcgatgagncactgcaanccccacaggngantgtggcagtggctgcgttggcggcctgcctatggggagacccataggacgctctaatgtggacatggtgngaagagcctattgagctagttagtagtcctccggcccctgaatgcggctaatcctaactgcggagcacangccntcaacccagagggtagtgtgtcgtaangggcaactctgcagcggaaccgactactttgggtgtccgtgtttcttnttattcttatattggcngcttatggtgacaattacagaattgttaccatatagctattggattggccatccggtgtgnaatagagctgttatatacctntttgttggntttgtnccactnactttaaaatctatannnacnctnaanttnatattnncnctcaanacanttnaac

SEQ ID NO: 24868 - DNA, 758 bp, synthetic construct
  source 1..758: mol_type = other DNA
ctaatgtctgntnnnnnnnnnnnnnnnnnnnnnccactcacaggacccacgcggtgctagcactctggttccacgggacctttgtgcgcctgttttatgtcccctnccccaatttgtaacttagaagcaatttgcaacactgatcagtagcaggcatagcgcaccagctatgtcttgatcaagcacttctgtttccccggaccgagtatcaatagactgtncacacggttgaaggagaaagcgtccgttatccggctaactacttcgagaaacccagtagcaccattgaaactacagagtgtttcgctccacacttcccccgtgtagatcaggtcgatgagtcactgcaatccccacgggcgaccgtggcagtggctgcgctggcggcctgcctatggggcaacccataggacgctctaatgtggacatggtgtgaagagtctattgagctagttagtagtcctccggcccctgaatgcggctaatcctaactgcggagcacatgccttcaatccagagggtagtgtgtcgtaatgggcaactctgcagcggaaccgactactttgggtgtccgtgtttccttttattctcacattggctgcttatggtgacaattacngaattgttaccatatagctattggattggccatccggtgtgcaatagagctattatatacctatttgttggctttgtaccactnaccttaaaatctntaaccactctcgagtgtatattaacccttaatacaatcaaac

SEQ ID NO: 24869 - DNA, 769 bp, synthetic construct
  source 1..769: mol_type = other DNA
nnnnnnnnnnnnnnnnnnnnntnnnnnnnnnnnnnnnnnnnnnncactcacaggacccacgcggtgctagcactctggttccacggnacctttgtgcgcctgttttangtcccctctccccaatttgtaacttagaagcaatttncaacactgatcantagcaggcatngcgcaccagctatgtcttgatcaagcacttctgtttccccggaccgagtatcaatagactgttcacacggttgaaggagaaagcgtccgttatccggctaactacttcgagaaacccagtagcnccattgaaactncagagtgtttcgctccacacttcccccgtgtagatcaggtcgatgagtcactgcaatccccacgggcgaccgtggcagtggctgcgctggcggcctgcctatggggcaacccataggacgctctaatgtggacatggtgngaagagtctattgagctagttagtagtcctccggcccctgaatgcggctaatcctaactgcggagcacatgccttcaanccagagggtagtgtgtcgtaatgggcaactctgcagcggaaccgactactttgggtgtccgtgtttccttttattctcacattggctgcttatggtgacaattacagaattgttaccatatagctattggattggccatccggtgtgcaatagagctattatatacctatttgttggctttgtaccactnaccttaaaatctntaaccactctngagtntatattaacccttaatacaatcaaac

SEQ ID NO: 24870 - DNA, 833 bp, synthetic construct
  source 1..833: mol_type = other DNA
tatgtttccnnnctnntngnnnnnnnnnnnnnnnnggtngttcccacccacagggcccactgggcgccagtacactggtatgccnnnncctnggtatnacggtaccnttnnnnnncagtacctttgtacgcctgttttatatnccctccccnaanngtaaccttagaagtttaaataaacaaagaccaataggagtccaacanccagttggattgcggtcaagcacttctgtctccccggacctagtagtgataggctgtacccacggccgaagatgaacccgtccgttatccggccagctacttcgagaagcctagtancatcaaagatctgtcttggcgtttcgctcagcgcgttccccccgcgtagatcgggctgatgggtctccgcatnccccacgggcgaccgtggcggaggccgcgtggcggcccgcctatggcgaaagccataggacgccatttcagtgacagggtgtgaagagcctattgagctagttggtagtcctccggcccctgaatgcggctaatcctaaccacggagcntccgccaacaaaccagttggnagggngtcgtaacgggtaactctgtggcggaaccgactactttgggtgtccgtgtttccttttgatcctattttggctgcttatggtgacaacgataagttgttatcataaagcttttgggttggccacctggaaaaagttatcagtgtttgatattgttcggctttcacgcctaccaataaaacaagctttatatttnttaatttcattttatccatnnnaggatattactgaatttcatntacaactnttgctcacantatcagcaan

SEQ ID NO: 24871 - DNA, 767 bp, synthetic construct
  source 1..767: mol_type = other DNA
annnnnnnnnnnnnnnnnnnnttaaaacagcctgtgggttgcacccacccacagggccnactgggcgctagcactctggnactnaggtacctttgtgcgcctgttttnnntncccttnccccgaagtaacttagaagctgtnaancaacgatcaanagnaggtgtgacacaccagtcatancttgatcaagcacttctgtttccccggactgagtatcaataggctgctcgcgcggctgaaggagaaaacgttcgttacccgaccaactacttcgagaagcttagtaccaccatgaacgaggcagngtgtttcgntcagcacaaccccagtgtagatcaggctgatgagtcactgcaacccccatgggcgaccatggcagtggctgcgttggcggcctgcccatggagaaatccatgggacgctctaattctgacatggtgtgaagagcctattgagctagctggtagtcctccggcccctgaatgcggctaatcctaactgcggagcacatgctcacaaaccagtgggtggtgtgtcgtaacgggcaactctgcagcggaaccgactactttgggtgtccgtgtttcctttttattcttatnttggctgcttatggtgacaatcaaaganttgttaccatatagctattggattggccatccggtgtgcaacagagcaattgtttacctatttnttggttttgtaccantatcactgaagtctgtgatcactctcaaattcattttgaccctcaacncaatcaaac

SEQ ID NO: 24872 - DNA, 633 bp, synthetic construct
  source 1..633: mol_type = other DNA
atttaccatgtgnnnnnnnnnnnnnnnnnnnnnnnnannnntgtgcccaatctcttgactcctgctggaaccaccgaccagtagtgtccaaaatgcnaggtggaaaatcctcccttcccctctgggctncatgcccngcatcctccccccagcctgacgtgccacaggctgtgcaaagaccccgcgaaagctgccaaaagtggcaattgtgggtcccccctttgtcaaggcgtcgagtctttctcccttaaggctagnccngtcagtgaactctgtcgggcaactagtgacgccactgcatgcctccgacctcggccgcggagtgctgccccccaagtcatgcccctgaccacaagttgtgctgtctggcaaacantgtctgtgagaatgttccgctgtggctgccaagcctggtaacaggctgccccagtgtgcgtanttctcatccagacntcggtctggcaacttgctgttaagacatggcgtaaggggcgtgtgccaacgccctggaacgagtgtccactctaataccccgaggaatgctacgcaggtacccctggctcgccagggatctgagcgtaggctaattgtctaagggtattttcatttcccacnctctnnttcttgttcata

SEQ ID NO: 24873 - DNA, 665 bp, synthetic construct
  source 1..665: mol_type = other DNA
cagaacttgtgtcgtggataatgtaacttagaagttattaaacaaagttcaatagaagggggtacaaaccagtgccaccacgaacaagcacttctgtttccccggtgaagctgtatagactgtctccacggttgaaaatggcagatccgttacccgctttggtacttcgagaaacctagtatcaccttggaatcttcgatgcgttgcgctcagcactcaaccccagagtgtagcttaggtcgatgagtctggacgatcctcactggtgacagtggtccaggctgcgttggcggcctacctgtggtgaaaaccacaggacgctagttgtgaacaaggtgtgaagagtctattgagctaccaaagagtcctccggcccctgaatgcggctaatcctaaccacggagcaagtgccttcaaaccagtaggtagcttgtcgtaacgcgcaagtctgtggcggaaccgactactttgggtgtccgtgtttccttttattttatcatggctgcttatggtgacaatctaagattgttatcatatagctattggattggccatccggtgactaacagagatctcatatacctttttgttggttttactaaattaaatattaccacgttcaagacacttctccttatcatacaactaaatagtgagaagagaaa

SEQ ID NO: 24874 - DNA, 763 bp, synthetic construct
  source 1..763: mol_type = other DNA
caccctcaggtgcaaagatgttaaaacagctctggggttgttcccacccacagggcccactgggcgctagcactctggtatcccggtacccttgtgcgcctgttttatctacccttccccaattgcaatttagaagttcaacactcacggtcaatagacggctcagtacgccaactgagttacgaccaagtacttctgttaccccggaccgagtatcaataggctgctcacgcggctgaaggagaaaacgttcgttatccggccaattacttcgagaaacctagtaccaccatgaaggttgcgcagcgtttcgctccgcacaaccccagtgtagatcaggccgatgagtcaccgcactccccacgggcgaccgtggcggtggctgcgctggcggcctgcccatggggtaacccatgggacgcttcaatactgacatggtgcgaagagtctattgagctaattggtagtcctccggcccctgaatgcggctaatcctaactgcggagcaggtacccacatgccagtgggcaatctgtcgtaatgggcaactctgcagcggaaccgactactttgggtgtccgtgtttccttttattcctatactggctgcttatggtgacaattgagagattgttaccatatagctattggattggccatccggtgacaaacagagcaattgtttacttatttgttggttttgtaccattaaattttaaggctctaagaacacttaattacatattattactcaactcattcaa

SEQ ID NO: 24875 - DNA, 762 bp, synthetic construct
  source 1..762: mol_type = other DNA
tnnnnnnnnnnnnnnnnncnnnnaaacagctctggggttgttcccaccccagaggcccacgtggcggctagtacactggtatcacggtacctttgtacgcctgttttatactccctcccccgcaacttagaagcatacaantcaagctcaataggagggggtgcaagccagcgcctccgtgggcaagcactactgtttccccggtgaggccgcatagactgttcccacggttgaaagtgnccgatccgttatccgctcatgtacttcgagaagcctagtatcgctctggaatcttcgacgcgttgcgctcagcactcaaccccggagtgtagcttgggccgatgagtctggacagtccccactggcgacagtggtccaggctgcgctggcggcccaccngtggcccaaagccacgggacgctagttgtgaacagggtgtgaagagcctattgagctacatgagagtcctccggcccctgaatgcggctaatcctaaccatggagcaggcagctgcaacccagcagccagcctgtcgtaacgcgcaagtccgtggcggaaccgactactttgggtgtccgtgtttccttttattcttgaatggctgcttatggtgacaatcatagattgttatcataaagcgagttggattggccatccagtgtgaatcagattaattactcccttgtttgttggatccactcccgaaacgttttactccttaacttattgaaattgtttgaagacaggatttcagtgtcaca

SEQ ID NO: 24876 - DNA, 767 bp, synthetic construct
  source 1..767: mol_type = other DNA
caannnnnnnnnnnnnnnnnnnnttaaaacagctctggggttgttcccaccccagaggcccacgtggcggctagtactctggtatcgcggtacctttgtacgcctgttttataccccnaccccatgtaactttagaagcagttcaacaagttcaatagggggggtgcaaaccagcaccaccacgaacaagcacttctgtaaccccggtnaccttgtatangctgtacccacggctgaaagcgagtgatccgttatccgcttaagtacttcgagaagcctagtancaccttagaatcttcgatgcgttgcgctcagcactctatcccgagtgtagcttaggctgatgagtctgggcgttccncaccggcgacggtggcccaggctgcgttggcggcctacccatggctaacgccatgggacgctagatgtgaacaaggtgtgaagagcctattgagctacttaagagtcctccggcccctgaatgcggctaatcccaaccacggagcaggtgccttcaacccagagggtggcctgtcgtaacgcgcaagtctgtggcggaaccgactactttgggtgtccgtgtttccttttatcttttatatggctgcttatggtgacaatcatagattgttatcataaagcgacttggattggccatccggtaaaatacaaacacatcanttacttgtttgttggatttactccactcncccaatttactcctagcataatatccattgttttgttaanaagacattactatcaca

SEQ ID NO: 24877 - DNA, 778 bp, synthetic construct
  source 1..778: mol_type = other DNA
caacccaccaacggtacaccgcncnnnttnnngnnnnnnnnnnnnnnnattcccaaggcccactcggttcaacttcggtttccggacaaatanaaagaacctcagtcctcttggtactttctcgcctgagtctacaaagcgagaaacctgcccctctaacgccagacgagcggcataaaactcgaacttctggcacgttccaccaccccttctcctatcccaacccccattgcgctctcaaggtcgcgcttttccgagactagctcggattcaaaaagttcctggcaccctttaccccttcaggcccttaaggtaggaactgaccttgtgctgtgatctcggtgcggaagtgctactgcgtagtgattgtaagatccttttgtggttctgccctggcaaggctacagagtgctgtgatccgctgcggatgccatcctggtaacaggacccccagtgtgcgcaacagtatgttcacggtcttccgtgttcaccacattcggaacactgctttcgtgaaacagtgtgtgtccaatccctgtgatcagtatcaaccacaccacctaggaatgctaggaaggtaccccggttcgccgggatctgatcctaggctaattgtctacggtggtgctcctttttattttccacttcaactcactggttacaactgcttgatttctgtgtttgctgcttttctctgctctcactgccattctcaagtgttcacactgtccaagctcctttggttgttcgcttccacttgccactgtcaactcttgtc

SEQ ID NO: 24878 - DNA, 782 bp, synthetic construct
  source 1..782: mol_type = other DNA
gtttgatggcgtgnnnnnnnnnnnnnnnnnnnnttaaaacagcctgtgggttgttcccacccacagggcccactgggcgctagcacactgattctgcgggatctttgtgcgcctgttttataacccttncccctaagcagcaacttagaagctttgnacaatcacgaccantagtgggcgtgncgcgccagtcacgtcttggtcaagcacttctgtntccccggactgagtatcaatagactgctcacgcggttgaaggagaaaacgttcgttanccggctaactacttcgagaaacctagtagcaccntgaaagttgcggagtgtttcgctcagcacttcccccgtgtagatcaggtcgatgagtcactgtaaaccccacgggcgaccgtgacagtggctgcgttggcggcctgcccatggggtaacccatgggacgctctaatacagacatggtgngaagagtctattgagctagttagnagtcctccggcccctgaatgcggctaatcctaactgcggagcgcgcaccctcaacccaggggggcggcgngtcgtaatgggtaactctgcagcggaaccgactactttgggtgtccgtgtttccttttttattcnttattggctgcttatggtgacaattgaaaagttgttaccatatagctattggattggccatccggtgtcnaacagagctattgtttacctatttattggatacgtccctcttaatctcaaggccattcaaactcttgattatatattgctccttaantgtaagaa

SEQ ID NO: 24879 - DNA, 767 bp, synthetic construct
  source 1..767: mol_type = other DNA
caannnnnnnnnnnnnnnnnnnnttaaaacagctctggggttgttcccaccccagaggcccacgtggcggctagtactctggtatcgcggtacctttgtacgcctgttttataccccnaccccatgtaactttagaagcagttcaacaagttcaatagggggggtgcaaaccagcaccaccacgaacaagcacttctgtaaccccggtgaccttgtataagctgtacccacggctgaaagcgagtgatccgttatccgcttaagtacttcgagaagcctagtatcaccttagaatcttcgatgcgttgcgctcagcactctatcccgagtgtagcttaggctgatgagtctgggcgttccncaccggcgacggtggcccaggctgcgttggcggcctacccatggctaacgccatgggacgctagatgtgaacaaggtgtgaagagcctattgagctacttaagagtcctccggcccctgaatgcggctaatcccaaccacggagcaggtgccttcaacccagagggtggcctgtcgtaacgcgcaagtctgtggcggaaccgactactttgggtgtccgtgtttccttttatcttttatatggctgcttatggtgacaatcatagattgttatcataaagcgacttggattggccatccggtaaaatacaaacacatcatttacttgtttgttggatttactccactctcccaatttactcctagcataatatccattgttttgttaacaagacattactatcaca

SEQ ID NO: 24880 - DNA, 748 bp, synthetic construct
  source 1..748: mol_type = other DNA
atcgaaaggcttatacgatcccacgtgtgtatgccaacctacatggactcnnnnnnntaggntnnannnncaaccctttcataaccccccccttttaacccnncnnnnngtnancnnacgcttcactcgcctttgggtatagcggcccaatgtgctgaagaaaaggatacgctataaggggccaacgggtggtggcccttaagaccacccaacctagaagcttgtacactcgggcaatagtgaggcccacatccagtgggtcaagcccaaagcattcttgttccccggtatgatctcataagctgtacccacggctgaaagagtgattatcgttatcccactcagtacttcggagagcctagtacaccacttggaaatggaagtctgtgatccggggttgaccctgaaccccagaaactcatgatgaggctaaccttcccgaacacggcgacgtgtggttagcctgcgctggcatgaggcctctttgtaggcagactgaaatggaagggtgacgaagagccgactgagctactgttttattcctccggccccctgaatgcggctaatcctaactcctggtccagtacttgtaacccaacaggtggctggtcgtaatgcgtaagccgggagcggaaccgactactttggggcgtccgtgtttctcaatattattcatttctagcttatggtgacaatttatgattgcagagattgtgctgtatttgtgtctgagagaagaagtaacaat

SEQ ID NO: 24881 - DNA, 778 bp, synthetic construct; identical to SEQ ID NO: 24877
  source 1..778: mol_type = other DNA

SEQ ID NO: 24882 - DNA, 762 bp, synthetic construct
  source 1..762: mol_type = other DNA
nnnnnnnnnnnnnnnnnnnnttaaaacagctctggggttgnacccaccccagaggcccacgtggcggctagtactccggtattgcggtacccttgtacgcctgttttatactcccttcccgtaacttagacgcacaaaaccaagttcaatagaagggggtacaaaccagtaccaccacgaacaagcacttctgtttccccggtgatgttgtatagactgcttgcgtggttgaaagcgacggatccgttatccgcttatgtacttcgagaagcccagtaccacctcggaatcttcgatgcgttgcgctcagcactcaaccccagagtgtagcttaggctgatgagtctggacatccctcaccggtgacggtggtccaggctgcgttggcggcctacctatggctaacgccatgggacgctagttgtgaacaaggtgtgaagagcctattgagctacataagaatcctccggcccctgaatgcggctaatcccaacctcggagcaggtggtcacaaaccagtgattggcctgtcgtaacgcgcaagtccgtggcggaaccgactactttgggtgtccgtgtttccttttattttattgtggctgcttatggtgacaatcacagattgttatcataaagcgaattggattggccatccggtgaaagtgagattcattatctatctgtttgctggattcgctccattgagtgtgtttactctaagtacaatttcaacagttatttcaatcagacaattgtatcana

SEQ ID NO: 24883 - DNA, 773 bp, synthetic construct
  source 1..773: mol_type = other DNA
accaccgtgaatgcgacaatggcgcgcctcggcaaggccgccgataccgcactgtgctacttcggtaccactctgcgggaatgacaatatgcccggtgtatagtttgcctgtttctcgcacnnnnnnngcnnnnncggnantgtgaaactggcacccctcctctcccctaccaccctttctccttcgcccccattcataatttacaacgccgcacacagcggcggccgccaagggctagcctggcggttataaaaggaacctgggtctttccctcttcaagccaaaaggtaggttccctgtgtccctgaatgctcggtgaggaatgctgcaccgtaacgctttgtgaagtgtttgcaagttctggcccggcaagcctacagagtgctgtgatccgctgcggacgccatcctggtaacaggacccccagtgtgcgcaacagtatgttcagacttcggtttgttcacttgctttcatggaccattgcgcgaaagtgcgtgcgccatatccctgtacttcaggtgtgcttctctggaccctaggaatgctgcgaaggtaccccgtttcggcgggatctgatcgcaggctaattgtctatgggttcagtttcctttttctttactccacaattgactgcttaactgactctggatcttgtgcttccactgctctttctgctctcaaaacggcttcacttaccaactctcacctttcgaccaacaccatttacacactaacttttttcgactcttctgactcctggcttggtgaagac

SEQ ID NO: 24884 - DNA, 645 bp, synthetic construct
  source 1..645: mol_type = other DNA
nnnnnnnnnnnnnnnnnnnnattctcgggctacggccctggagccactccggctcctaaagatttagaagtttgagcacacccgcccactagggccccccatccaggggggcaacgggcaagcacttctgtttccccggtatgatctgataggctgtaaccacggctgaaacagagattatcgttatccgcttcactacttcgagaagcctagtaatgatgggtgaaattgaatccgttgatccggtgtctcccccacaccagaaactcatgatgagggttgccatcccggctacggcgacgtagcgggcatccctgcgctggcatgaggcctcttaggaggacggatgatatggatcttgtcgtgaagagcctattgagctagtgtcgactcctccgcccccgtgaatgcggctaatcctaaccccggagcaggtgggtccaatccagggcctggcctgtcgtaatgcgtaagtctgggacggaaccgactactttcgggaaggcgtgtttccatttgttcattatttgtgtgtttatggtgacaactctgggtaaacgttctattgcgtttattgagagattcccaacaattgaacaaacgagaactacctgttttattaaatttacacagagaagaattaca

SEQ ID NO: 24885 - DNA, 769 bp, synthetic construct
  source 1..769: mol_type = other DNA
acgttcgctgcggtgccaatttaaaacagctctggggttgttcccaccccagaggcccacgtggcggctagtactctggtattacggtacctttgtacgcctgttttatactcccttcccctccgtaacttagaagcatgagaatcaagttcaatagaagggggtacaaaccagtaccaccacgaacaagcacttctgtcaccccggtgaggttgtatagactgtccccacggttgaaagcgactgatccgttatccgctcaattacttcgggaagcctagtaccatcctggaatcttcgatgcgttgcgctcagcactcaaccccagagtgtagcttaggccgatgagtctggacaatcctcactggcgacagtggtccaggctgcgttggcggcctacctgtggtccaaagccacaggacgctagttgtgaacaaggtgcgaagagcctactgagctaattgagagtcctccggcccctgaatgcggctaatcccaaccacggagcaggcggttgcaaaccagcaactggcttgtcgtaacgcgaaagtctgtggcggaaccgactactttgggtgtccgtgtttccttttattcttatgatggctgcttatggtgacaatcgttgattgttatcataaagcgaattggattggccatccggtgaaaatcaaatctattgtttacctgttcattgggttcactccactaacttcacacactatatatctcattaaggtcgtattactagtaaggaattatcaccaaa

SEQ ID NO: 24886 - DNA, 522 bp, synthetic construct
  source 1..522: mol_type = other DNA
cgagctccgtgaataaactccttcactttccataactacagtgctttggtaggtaagcatcctgaccccccgcggaagctgccaacgtggcaactgtggggatccaggcaggttatcaaaggcacccggtctttccgccttcaggagtatccctgccggtgaattccgacagggctctgcttggtgccaacctcccccaaatgcgcgctgcgggagtgctcttccccaactcatcttagtaacctctcatgtgtgtgcttggtcagcatatctgaggcgacgttccgctgtcccagaccagtccagcaatggacgggccagtgtgcgtagtcgctttccggtttcccggcgcatgtttggcgaaacgctgaggtaaggttggtgtgcccaatgcccgtaatttggtgacacctcaagaccacccaggaatgccagggaggtaccccacttcggtgggatctgaccctgggctaattgtctacggtggttcttcttgcttccacttctcttttttctggcatg

SEQ ID NO: 24887 - DNA, 661 bp, synthetic construct
  source 1..661: mol_type = other DNA
aggagtgctgatatagattcggatttaggccgtggtgcccgtgggcacgacggccacggctccagccgcactcctctccacgccttgtcccacgggacataaagtggagccctaagccctaaacccccatgttacccaattttcttatccacttccctttttccctttgactcacatttttcttgaccgcgcttgtgaggcggttcccgtacagttgagttgacgggtcccgcgcgggacctgaaaattactccatactgattaggaaaggttctagtacgcttgtacccttaaggccagcgggctacctcctttaggtcttatagccccaactggttagaaccactccagctcacctctatcggtgcgggagtgctaccacccctgcctgcgtcaagcccgtttttctagtgatctgtccacaaacacttggattcccgtcgcgactgacagaacctggcgacaggtgtctcgatgtgtgtgaccaagtggcatgagaatcggaaactaacgctggtaagatggtaagtgcccaatccctgtggggtgatgtttttctctgcataggaatgctgcgaaggtaccccggccttgagtcgggatctgatcgcaggctaattgtcctctgtgcagttcatttccttttcttttcattggcatc

SEQ ID NO: 24888 - DNA, 769 bp, synthetic construct; identical to SEQ ID NO: 24869
  source 1..769: mol_type = other DNA

SEQ ID NO: 24889 - DNA, 731 bp, synthetic construct
  source 1..731: mol_type = other DNA
nnnnnnnnnnnnnnnnnnnnntaaaanngccttggggttgttcccactccaagggcccacgtggcggctagtactctggtacttcggtacctttgtacgcctgttttatctcccttcccaatgtaanttagaagntcttaaatcaangctcaataggtggggcgcaaaccagcgctctcatgagcaagcactcctgtctccccggtgnggttgtataaactgttcccacggttgaaaacaacctatccgttatccgctatagtacttcgagaaacctagtatcacctttggattgttgacgcgttgcgctcagcacactaacccgtgtgtagcttgggtcgatgagtctggacataccccactggcgacagtggtccaggctgcgttggcggcctactcatggtgaaaaccatgagacgctagacatgaacaaggtgtgaagagtctattgagctactatagagtcctccggcccctgaatgcggctaatcctaaccatggagcaagtgctcacaggccagtgagttgcttgtcgtaatgcgcaagtccgtggcggaaccgactactttgggtgtccgtgtttcactttttacttttatgactgcttatggtgacaatttgatattgttaccatttagcttgtcaaatnaattgcaaaagatcctaaatcttanttancaanttgcattttgataacnttnatttgaaaattttaanannnnnntnaanna

SEQ ID NO: 24890 - DNA, 683 bp, synthetic construct
  source 1..683: mol_type = other DNA
agatactatagatggatccacctcggccccctcaccctcttttccggtggccacgcccgggccaccgatacttcccttnncnnnnncgggantnntnnnnngnaacncnacannnnnnnnntntttnnnnnnncnntcccccttttccnaaccccaaccgccgtatctggtggcggcaagacacacgggtctttccctctaaagcacaattgtgtgtgtgtcccaggtcctcctgcgtncggtgcgggagtgctcccacccaactgttgtaagcctgtccaacgngtcgtcctggcaagactatgacgtcgcatgttccgctgcggatgccgaccgggtaaccggttccccagtgtgtgtagtgcgatcttccaggtnctcctggttggcgttgtccagaaactgcttcaggtaagtggggtgtgcccaatccctacaaaggttgattctttcaccaccttaggaatgctccggaggtaccccagcaacagctgggatctgaccggaggctaattgtctacgggtggtgtttcctttttctttttcacacaactnnantgctgacaactcactgactanccacttgctctcttgtgcctttctgctctggttcaagttccttgattgtttttgantgctttttnantgcttttcttcncacaatccttgctcagttcaaagtc

SEQ ID NO: 24891 - DNA, 652 bp, synthetic construct
  source 1..652: mol_type = other DNA
ttgagtggcctcaccggaattgtgaaactngnnnnnnnnnnnnnccctnccaccctttctccttcgcccccattcataantnnnnncgnnnnnnnnnncggcggccgccaagggctagcctggcggttataaaaggaacctgggtctttccctcttcaagccaaaaggtaggttccctgtgtccctgaatgctcggtgaggaatgctgcaccgtaacgctttgtgaagtgtttgcaagttctggcccggcaagcctacagagtgctgtgatccgctgcggacgccatcctggtaacaggacccccagtgtgcgcaacagtatgttcagacttcggtttgttcacttgctttcatggaccattgcgcgaaagtgcgtgcgccatatccctgtacttcaggtgtgcttctctggaccctaggaatgctgcgaaggtaccccgtttcggcgggatctgatcgcaggctaattgtctatgggttcagtttcctttttctttactccacaattgactgcttaactgactctggatcttgtgcttccactgctctttctgctctcaaaacggcttcacttaccaactctcacctttcgaccaacaccatttacacactaacttttttcgactcttctgactcctggcttggtgaagac

SEQ ID NO: 24892 - DNA, 769 bp, synthetic construct
  source 1..769: mol_type = other DNA
nnnnnnnnnnnnnnnnnannttnaaannnnnnnnggggntgttcccaccctagaggcccacgtggcggctagcactctggtatcacggtacctttgtgcgcctgttttatatccctttccccatgcaacttagaagttttttaaacaaagttcaatagaagggggtacaaaccagtgccaccacgaacaagcacttctgtttccccggtgaagctgcatagactgtccccacggttgaaagcggcagatccgtnatccgctttggtacttcgagaaacctagtatcaccttggaatcttcgatgcgttgcgctcagcactcaaccccagagtgtagcttaggttgatgagtctggacnatcctcactggcgacagtggtccaggctgcgttggcggcctacctgtggtgaaaaccacaggacgctagatgtgaacaaggtgtgaagagtctattgagctaccaaagagtcctccggcccctgaatgcggctaatcctaaccacggagcaagtacccacaaaccagtgggcagcttgtcgtaacgcgcaagtctgtggcggaaccgactactttgggtgtccgtgtttcctttttattttatcatggctgcttatggtgacaatctaagattgttatcatatagctattggattggccatccggtgactaacagagatattatatacctatttgttggttttnttagattaaatactatcacattcaaaactcttctttatatcatacaattgaacagtagaaagagaaa

SEQ ID NO: 24893 - DNA, 751 bp, synthetic construct
  source 1..751: mol_type = other DNA
tttaaaacagcctgtgggttgtacccacccacagggctcactgggcgctagcacactggtatcacggtacccttgtgcgcctgttttatacaccctcccccctttttgtaacttagaagaaacaaacacacgatcaatagcaggcttagcgcaccagctaagtcttgatcaagcacttctgttaccccggactgagtatcaataagctgtgcccacggctgaaagagaaaacgttcgttacccggctgtctacttcgggaaacctagtaccatcatgaagactgcaaagcgtttcgctcagcacaaccccagtgtagatcaggtcgatgagtcactgcattcctcacaggcgactgtggcagtggctgcgttggcggcctgcctatggggaaacccataggacgctttaatgttgacatggtgcgaagagtctactgagctaggtagtagtcctccggcccctgaatgcggctaatcccaaccacggagcaggcgctcacactccagtgagtagcctgtcgtaatgcgcaagtctgtggcggaaccgactactttgggtgtccgtgtttccttttattcttatcatggctgcttatggtgacaatctaagattgttatcatatagctattggattggccatccggtgaactgtagagatattatctatttgtttgttggttttaccaagttaaacatcaccagctacaccactcttctttatatcatattattgaacagtaaaaagagaaa

SEQ ID NO: 24894 - DNA, 751 bp, synthetic construct
  source 1..751: mol_type = other DNA
ttaaaacagcctgtgggttgtgacccacccacagggcccactgggcgctagcactctgattctacggaatccttgtgcgcctgttttatgtcccttcccccaatcagtaacttagaagcattgcacctctttcgaccgttagcaggcgtggcgcaccagccatgtcttggtcaagcacttctgtttccccggaccgagtatcaatagactgctcacgcggttgagggagaaaacgtccgttacccggctaactacttcgagaagcctagtagcaccatgaaagttgcagagtgtttcgctcagcacttcccccgtgtagatcaggtcgatgagtcactgcgatccccacgggcgaccgtggcagtggctgcgttggcggcctgcctgtggggtaacccacaggacgctctaatatggacatggtgcaaagagtctattgagctagttagtactcctccggcccctgaatgcggctaatcctaactgcggagcacataccctcgacccagggggcagtgtgtcgtaacgggcaactctgcagcggaaccgactactttgggtgtccgtgtttccttttattcttatactggctgcttatggtgacaattgaaagattgttaccatatagctattggattggccatccggtgtgcaacagagctattatttacctatttgttgggtatataccactcacatccagaaaaaccctcgacacactagtatacattctttacttgaattgtagaaa

SEQ ID NO: 24895 - DNA, 750 bp, synthetic construct
  source 1..750: mol_type = other DNA
ttaaaacagcctgtgggttgtgacccacccacagggcccactgggcgctagcactctgattctacggaatccttgtgcgcctgttttatgtcccttcccccaatcagtaacttagaagcattgcacctctttcgaccgttagcaggcgtggcgcaccagccatgtcttggtcaagcacttctgtttccccggaccgagtatcaatagactgctcacgcggttgagggagaaaacgtccgttacccggctaactacttcgagaagcctagtagcaccatgaaagttgcagagtgtttcgctcagcacttcccccgtgtagatcaggtcgatgagtcactgcgatccccacgggcgaccgtggcagtggctgcgttggcggcctgcctgtggggtaacccacaggacgctctaatatggacatggtgcaaagagtctattgagctagttagtactcctccggcccctgaatgcggctaatcctaactgcggagcacataccctcgacccagggggcagtgtgtcgtaacgggcaactctgcagcggaaccgactactttgggtgtccgtgtttccttttattcttatactggctgcttatggtgacaattgaaagattgttaccatatagctattggattggccatccggtgtgcaacagagctattatttacctatttgttgggtatataccactcacatccagaaaaaccctcgacacactagtatacattctttacttgaattgccacc

SEQ ID NO: 24896 - DNA, 513 bp, synthetic construct
  source 1..513: mol_type = other DNA
gtggccacgcccgggccaccgatacttcccttcactccttcgggactgttggggaggaacacaacagggctcccctgttttcccattccttcccccttttcccaaccccaaccgccgtatctggtggcggcaagacacacgggtctttccctctaaagcacaattgtgtgtgtgtcccaggtcctcctgcgtacggtgcgggagtgctcccacccaactgttgtaagcctgtccaacgcgtcgtcctggcaagactatgacgtcgcatgttccgctgcggatgccgaccgggtaaccggttccccagtgtgtgtagtgcgatcttccaggtcctcctggttggcgttgtccagaaactgcttcaggtaagtggggtgtgcccaatccctacaaaggttgattctttcaccaccttaggaatgctccggaggtaccccagcaacagctgggatctgaccggaggctaattgtctacgggtggtgtttcctttttcttttcacacaactgtcacg

SEQ ID NO: 24897 - DNA, 25 bp, synthetic construct
  source 1..25: mol_type = other DNA
caaaacaaacacaaaccaacaaaaa

SEQ ID NO: 24898 - DNA, 25 bp, synthetic construct
  source 1..25: mol_type = other DNA
atgggagtgaaggtgctgttcgccc

SEQ ID NO: 24899 - DNA, 23 bp, synthetic construct
  source 1..23: mol_type = other DNA
atgggagtgaaggtgctgttcgc

SEQ ID NO: 24900 - DNA, 37 bp, synthetic construct
  source 1..37: mol_type = other DNA
tttttgttggtttgtgtttgttttgtttggtgtttgc
